(19) United States
(12) Patent Application Publication
(10) Pub. No.: US 2026/0152735 A1
(43) Pub. Date: Jun. 4, 2026

(54) CHIMERIC GENOME ORGANISMS AND METHODS SYNTHESIZING THEREOF

(71) Applicant: California Institute of Technology, Pasadena, CA (US)

(72) Inventors: Charles J. Sanfiorenzo, Pasadena, CA (US); Raymond J. Zhang, Pasadena, CA (US); Kaihang Wang, Pasadena, CA (US)

(21) Appl. No.: 19/405,152

(22) Filed: Dec. 1, 2025

Related U.S. Application Data
(60) Provisional application No. 63/726,824, filed on Dec. 2, 2024.

(51) Int. Cl. C12N 15/03; C12N 1/20; C12N 5/12; C12N 9/22; C12N 15/113; C12N 15/74; C12N 15/79; C12R 1/63

(52) U.S. Cl. CPC C12N 15/03; C12N 1/20; C12N 5/12; C12N 9/222; C12N 15/113; C12N 15/74; C12N 15/79; C12N 2310/20; C12R 2001/63

(57) ABSTRACT

Disclosed herein include methods, compositions, and kits suitable for use in generation of genome-expanded organisms comprising, e.g., a chimeric genome. In some embodiments, the methods, systems and nucleic acid compositions include systems comprising a donor cell comprising one or more components of a delivery module and a recipient cell comprising one or more components of an integrator module. In some embodiments, the methods, systems and nucleic acid compositions comprise polynucleotides encoding one or more components of a delivery module, and one or more components of an integrator module.

### RELATED APPLICATIONS

[0001] The present application claims priority to U.S. Provisional Application No. 63/726,824, filed Dec. 2, 2024. The content of this related application is incorporated herein by reference in its entirety for all purposes.

### STATEMENT REGARDING FEDERALLY SPONSORED R&D

[0002] This invention was made with government support under Grant No. GM140937 awarded by the National Institutes of Health. The government has certain rights in the invention.

### REFERENCE TO SEQUENCE LISTING

[0003] The present application is being filed along with a Sequence Listing in electronic format. The Sequence Listing is provided as a file entitled 30KJ-810017-US_SequenceListing, created Nov. 27, 2025, which is 1.21 MB in size. The information in the electronic format of the Sequence Listing is incorporated herein by reference in its entirety.

### BACKGROUND

### Field

[0004] The present disclosure relates generally to the field of genetic engineering.

### Description of the Related Art

[0005] The design and construction of custom genomes furthers our ability to understand and engineer biology. Organisms with designer genomes allow us to disentangle the complexities of gene functionality and essentiality, transcriptional and translational control, and genome fold and architecture. Moreover, designed genomes enable us to engineer novel properties and encode new functions into organisms, enhancing the potential of living systems to produce biological products and perform programmed tasks for health, environmental and manufacturing needs.

[0006] Landmark genome construction projects include the assembly of minimized Mycoplasma genomes, the recoding of Escherichia coli Syn61 genome, and the recent consolidation of multiple synthetic chromosomes in the “S. cerevisiae 2.0” synthetic yeast genome project. On-going efforts include recoding the E. coli Syn57 genome and the Salmonella typhimurium genome. These custom genomes can be typified as being minimized, recoded, reorganized, refactored or a combination of all the above.

[0007] One notable class of designer genomes consists of those harboring large additions or expansions of heterologous DNA. Rebooting large genome-scale fragments of DNA, from both natural and synthetic sources has implications for studying and engineering biology. However, prior studies have largely been constrained to investigating the factors determining heterologous expression of single genes. One notable study reported the assembly of a fragmented Synechocystis genome across the Bacillus subtilis genome in multiple non-continuous segments using SSRs, demonstrating the possibility of integrating large genome segments from phylogenetically distant sources into a recipient bacteria. However, the genome construction workflow used to install the entire 3.5 megabase (mb) genome is painstaking and time-consuming. Moreover, the inserted DNA was characterized to be transcriptionally silent. An important component for rebooting genomic fragments is the evaluation of the transcription and translation and ultimately physiological outcome resulting transferred DNA incorporated in the recipient genome. An open question is testing how large genomic fragments behave in expression as a function of increasing phylogenetic distance.

[0008] The many tools for transferring segments of DNA in microbes have their benefits and drawbacks. Existing reports involving interbacterial transfer of large fragments of DNA include the dual origin of transfer (oriT) cloning or site-specific integration of DNA into Agrobacterium tumefaciens and E. coli, which have been demonstrated for up to 240-kb of DNA. Recently, dual oriT combined with site-specific recombination into engineered bacterial artificial chromosomes have enabled expansion of this technique for megabase sized transfer and rearrangements in E. coli. However, these techniques rely on site-specific recombinases, which require an attachment site pre-engineered in the recipient genome and are thus limited in target versatility. Random, natural Hfr conjugative mating, conjugation coupled homologous recombination (CAGE) and genome fission and fusion have been used to hybridize natural and synthetic enterobacterial strains but are also at times limited in targeting and are dependent on homologous recombination and have only been demonstrated in enterobacteria. Cas9-coupled homologous recombination methods, used to synthesize the recoded E. coli Syn61 genome, have also been shown to enable iterative construction of heterologous human DNA in E. coli, but are restricted to the addition of 100-kb segments in a single step. Finally, in vitro methods to isolate large DNA for transformation of bacterial cells have been used to manipulate large 1-mb episomes in E. coli or to transplant fully synthetic genome into Mycoplasma. However, these methods have not been shown to be broadly generalizable to other organisms and are technically challenging. In sum, new technologies specifically enabling programmable megabase scale genomic recombination-independent integration in a single step are needed and would introduce new versatility and power to the toolbox of custom genome construction and large genomic fragment rebooting.

### SUMMARY

[0009] Disclosed herein include systems for producing a chimeric or trimeric genome. In some embodiments, the system comprises: a) a donor cell comprising: (i) a first start cassette (Cassette^{START}) comprising, from 5′ to 3′, at least one cis-acting component of a first delivery module and a first integration sequence, and (ii) a first stop cassette (Cassette^{STOP}) comprising, from 5′ to 3′, a second integration sequence and at least one cis-acting component of the first delivery module, wherein the first Cassette^{START} is integrated at a first site in the genome of the donor cell and the first Cassette^{STOP} is integrated at a second site in the genome of the donor cell, wherein intervening sequence between the first Cassette^{START} and the first Cassette^{STOP} defines a first genomic transfer window; and (iii) one or more trans-acting components of the first delivery module or one or more first helper polynucleotides each comprising a sequence encoding a trans-acting component of the first delivery module, wherein the first delivery module comprises the one or more trans-acting components; and b) a recipient cell comprising one or more components of an integrator module or one or more second helper polynucleotides each comprising a sequence encoding a component of an integrator module, wherein the integrator module comprises the one or more components.

[0010] In some embodiments: (1) a sequence defined by the first genomic transfer window is capable of being transferred from the donor cell to the recipient cell upon expression of the one or more trans-acting components of the first delivery module in the donor cell, thereby generating a first donor genomic segment in the recipient cell flanked by the first integration sequence and the second integration sequence of the first Cassette^{START} and the first Cassette^{STOP}; and (2) the first donor genomic segment is capable of being inserted into a first double-stranded target sequence in the genome of the recipient cell upon expression of the one or more components of the integrator module, thereby generating a chimeric genome in the recipient cell.

[0011] The system can comprise: c) a second donor cell comprising: (i) a second start cassette (Cassette^{START}) comprising, from 5′ to 3′, at least one cis-acting component of a second delivery module and a first integration sequence, and (ii) a second stop cassette (Cassette^{STOP}) comprising, from 5′ to 3′, a second integration sequence and at least one cis-acting component of the second delivery module, wherein the second Cassette^{START} is integrated at a first site in the genome of the second donor cell and the second Cassette^{STOP} is integrated at a second site in the genome of the second donor cell, thereby defining a second genomic transfer window; and (iii) one or more trans-acting components of the second delivery module or one or more first helper polynucleotides each comprising a sequence encoding a trans-acting component of the second delivery module, wherein the second delivery module comprises the one or more trans-acting components.

[0012] In some embodiments: (3) a sequence defined by the second genomic transfer window is capable of being transferred from the second donor cell to the recipient cell comprising the chimeric genome upon expression of the one or more trans-acting components of the second delivery module in the second donor cell, thereby generating a second donor genomic segment flanked by the first integration sequence and the second integration sequence of the second Cassette^{START} and the second Cassette^{STOP} in the recipient cell comprising the chimeric genome; and (4) the second donor genomic segment is capable of being inserted into a second double-stranded target sequence in the genome of the recipient cell comprising the chimeric genome upon expression of the one or more components of the integrator module, thereby generating a trimeric genome in the recipient cell comprising the chimeric genome. In some embodiments, the second double-stranded target sequence is comprised within the first donor genomic segment.

[0013] In some embodiments, the first and/or second genomic transfer window is about 10 kb to at least 2 MB in length. In some embodiments, the first and/or second donor genomic segment is about 10 kb to at least 2 MB in length. In some embodiments, any transcription termination sequence (ter) comprised within the first and/or second donor genomic segment is in the same orientation as any ter in or near: the first double-stranded target sequence in the genome of the recipient cell; and/or the second double-stranded target sequence in the genome of the recipient cell comprising the chimeric genome. In some embodiments, the chimeric genome and/or the trimeric genome is at least about 4 MB in length. In some embodiments, the chimeric genome and/or the trimeric genome is at least about 4 MB, 4.5 MB, 5 MB, 6 MB, 6.5 MB, 7 MB, 7.5 MB, 8 MB, 8.5 MB, 9 MB, 9.5 MB, or 10 MB in length.

[0014] In some embodiments, the donor cell, the second donor cell, the recipient cell, or any combination thereof is a eukaryotic cell. In some embodiments, the eukaryotic cell is a fungal cell. In some embodiments, the eukaryotic cell is a plant cell. In some embodiments, the donor cell, the second donor cell, the recipient cell, or any combination thereof is a prokaryotic cell. In some embodiments, the prokaryotic cell is or is derived from a bacterial species selected from the group comprising: an Acinetobacter species, an Actinobacillus species, an Actinomycetes species, an Actinomyces species, an Aerococcus species, an Aeromonas species, an Anaplasma species, an Alcaligenes species, a Bacillus species, a Bacteroides species, a Bartonella species, a Bifidobacterium species, a Bordetella species, a Borrelia species, a Brucella species, a Burkholderia species, a Campylobacter species, a Capnocytophaga species, a Chlamydia species, a Citrobacter species, a Coxiella species, a Corynebacterium species, a Clostridium species, an Eikenella species, an Enterobacter species, an Escherichia species, an Enterococcus species, an Ehrlichia species, an Epidermophyton species, an Erysipelothrix species, a Eubacterium species, a Francisella species, a Fusobacterium species, a Gardnerella species, a Gemella species, a Haemophilus species, a Helicobacter species, a Kingella species, a Klebsiella species, a Lactobacillus species, a Lactococcus species, a Listeria species, a Leptospira species, a Legionella species, a Leptospira species, Leuconostoc species, a Mannheimia species, a Microsporum species, a Micrococcus species, a Moraxella species, a Morganella species, a Mobiluncus species, a Micrococcus species, Mycobacterium species, a Mycoplasma species, a Nocardia species, a Neisseria species, a Pasteurella species, a Pediococcus species, a Peptostreptococcus species, a Pityrosporum species, a Plesiomonas species, a Prevotella species, a Porphyromonas species, a Proteus species, a Providencia species, a Pseudomonas species, a Propionibacterium species, a Rhodococcus species, a Rickettsia species, a Rhodococcus species, a Serratia species, a Stenotrophomonas species, a Salmonella species, a Serratia species, a Shigella species, a Staphylococcus species, a Streptococcus species, a Spirillum species, a Streptobacillus species, a Treponema species, a Tropheryma species, a Trichophyton species, an Ureaplasma species, a Veillonella species, a Vibrio species, a Yersinia species, or a Xanthomonas species. In some embodiments, the prokaryotic cell is or is derived from an archaeal species. In some embodiments, the genera and/or species of the donor cell and/or the second donor cell and the genera and/or the species of the recipient cell are the same or different.

[0015] Disclosed herein include nucleic acid compositions for producing a chimeric or trimeric genome. In some embodiments, the nucleic acid composition comprises: i) a first and/or second start cassette (Cassette^{START}) each comprising, from 5′ to 3′: at least one cis-acting component of a first and/or second delivery module and a first integration sequence; ii) a first and/or second stop cassette (Cassette^{STOP}) each comprising, from 5′ to 3′: a second integration sequence and at least one cis-acting component of the first and/or second delivery module; iii) one or more first helper polynucleotides each comprising a sequence encoding a trans-acting component of the first and/or second delivery module, wherein the first and/or second delivery module comprise one or more trans-acting components; and optionally iv) one or more second helper polynucleotides each comprising a sequence encoding a component of an integrator module, wherein the integrator module comprises one or more components.

[0016] In some embodiments: the first and/or second Cassette^{START} is comprised within a first orthogonal integration vector further comprising one or more third helper polynucleotides each comprising a sequence encoding a component of a first orthogonal integrator module, wherein the first orthogonal integrator module comprises one or more components; and the first and/or second Cassette^{STOP} is comprised within a second orthogonal integration vector further comprising one or more fourth helper polynucleotides each comprising a sequence encoding a component of a second orthogonal integrator module, wherein the second orthogonal integrator module comprises one or more components. In some embodiments, the first and/or second Cassette^{START} is flanked by a 5′ RE and a 3′ LE and the first and/or second Cassette^{STOP} flanked by a 5′ RE and a 3′ LE, and the integrator module, the first orthogonal integrator module, and the second orthogonal integrator module are orthogonal to each other.

[0017] In some embodiments, the first orthogonal integrator module and/or the second orthogonal integrator module are each derived from a Type I-B, Type I-D, Type I-F, or Type V-K CRISPR-associated transposase system of a bacteria. In some embodiments, the bacteria comprise Vibrio cholera (Vch), Pseudoalteromonas (Pse), or Scytonema hofmanni (Sho). In some embodiments, the first orthogonal integrator module and/or the second orthogonal integrator module are each derived from the Type I-F CRISPR-associated transposase system, wherein the Type I-F CRISPR-associated transposase system is Tn6677, Tn7000, Tn7001, Tn7002, Tn7003, Tn7004, Tn7005, Tn7006, Tn7007, Tn7008, Tn7009, Tn6900, Tn7010, Tn7011, Tn7012, Tn7013, Tn7014, Tn7015, Tn7016, or Tn7017.

[0018] In some embodiments: the one or more components of the first orthogonal integrator module and/or the one or more components of the second orthogonal integrator module comprise: i) an RNA-guided DNA binding complex, wherein the RNA-guided DNA binding complex comprises a Cas protein, a transposase, one or more crRNAs, or any combination thereof, and ii) a transposition complex comprising one or more transposases.

[0019] In some embodiments, the RE comprises the sequence of any one of SEQ ID NOs: 343-344 or a sequence having one, two or three mismatches relative to the sequence of any one of SEQ ID NOs: 343-344 and wherein the LE comprises the sequence of any one of SEQ ID NOs: 345-346 or a sequence having one, two or three mismatches relative to the sequence of any one of SEQ ID NOs: 345-346. In some embodiments, the one or more Cas proteins comprise a Cas6 protein, a Cas7 protein, and a Cas8 protein. In some embodiments: the Cas6 protein comprises an amino acid sequence that is at least 80%, 85%, 90%, 95%, 98%, 99%, or 100% identical to SEQ ID NO: 347 or SEQ ID NO: 348; the Cas7 protein comprises an amino acid sequence that is at least 80%, 85%, 90%, 95%, 98%, 99%, or 100% identical to SEQ ID NO: 349 or SEQ ID NO: 350; and/or the Cas8 protein comprises an amino acid sequence that is at least 80%, 85%, 90%, 95%, 98%, 99%, or 100% identical to SEQ ID NO: 351 or SEQ ID NO: 352. In some embodiments, the transposase of the RNA-guided DNA binding complex comprises a TniQ protein. In some embodiments, the TniQ protein comprises an amino acid sequence that is at least 80%, 85%, 90%, 95%, 98%, 99%, or 100% identical to SEQ ID NO: 353 or SEQ ID NO: 354. In some embodiments, the one or more transposases of the transposition complex comprise a TnsA protein, a TnsB protein, and a TnsC protein. In some embodiments, the one or more transposases of the transposition complex comprise a TnsAB fusion protein and a TnsC protein. In some embodiments: the TnsA protein comprises an amino acid sequence that is at least 80%, 85%, 90%, 95%, 98%, 99%, or 100% identical to SEQ ID NO: 355 or SEQ ID NO: 356; the TnsB protein comprises an amino acid sequences that is at least 80%, 85%, 90%, 95%, 98%, 99%, or 100% identical to SEQ ID NO: 357 or SEQ ID NO: 358; and/or the TnsC protein comprises an amino acid sequence that is at least 80%, 85%, 90%, 95%, 98%, 99%, or 100% identical to SEQ ID NO: 359 or SEQ ID NO: 360. In some embodiments, the RNA-guided DNA binding complex comprises one or more helper accessory proteins comprising ClpX and/or ClpP.

[0020] In some embodiments: the one or more crRNAs of the first orthogonal integrator module comprise a scaffold comprising the sequence of SEQ ID NO: 389 and/or wherein the nucleic acid sequence encoding the scaffold of the one or more crRNAs of the first orthogonal integrator module comprises the sequence of SEQ ID NO: 386; and or the one or more crRNAs of the second orthogonal integrator module comprise a scaffold comprising the sequence of SEQ ID NO: 390 and/or wherein the nucleic acid sequence encoding the scaffold of the one or more crRNAs of the second orthogonal integrator module comprises the sequence of SEQ ID NO: 387. In some embodiments, one of the one or more crRNAs of the first orthogonal integrator module comprises a spacer that is complementary to a search target sequence on a first strand of an upstream double stranded target sequence of a cell and/or one of the one or more the crRNAs of the second orthogonal integrator module comprises a spacer that is complementary to a search target sequence on a first strand of a downstream double stranded target sequence of the cell, wherein upon expression of the one or more components of the first orthogonal integrator module and/or the one or more components of the second orthogonal integrator module in the cell, the first and/or second Cassette^{START} is capable of being inserted into the upstream double-stranded target sequence in the genome of the cell and the first and/or second Cassette^{STOP} is capable of being inserted into the downstream double stranded target sequence in the genome of the cell, thereby generating a donor cell.

[0021] In some embodiments, the first and/or second delivery module comprises or is derived from a bacterial conjugation system. In some embodiments, the bacterial conjugation system is an RP4 (IncP), pKM101 (IncN), R388 (IncW), F, or Tumor-inducing (Ti) system. In some embodiments, the bacterial conjugation system is an RP4 (IncP) plasmid system, and wherein: the at least one cis-acting component comprises an RP4 origin of transfer (oriT) sequence. In some embodiments, the oriT sequence comprises a sequence of SEQ ID NO: 384 or a sequence that is at least 80%, 85%, 90%, 95%, 98%, 99%, or 100% identical to SEQ ID NO: 384; and the one or more trans-acting components comprise or are derived from gene products of the RP4 plasmid.

[0022] In some embodiments, the bacterial conjugation system is a Ti plasmid system, and wherein: the at least one cis-acting component comprises a Ti origin of transfer (oriT) sequence; and the one or more trans-acting components comprise or are derived from gene products of the Ti plasmid. In some embodiments, the bacterial conjugation system is a pKM101 (IncN) plasmid system, and wherein: the at least one cis-acting component comprises a pKM101 (IncN) origin of transfer (oriT) sequence; and the one or more trans-acting components comprise or are derived from gene products of the pKM101 (IncN) plasmid. In some embodiments, the bacterial conjugation system is an R388 (IncW) plasmid system, and wherein: the at least one cis-acting component comprises an R388 (IncW) origin of transfer (oriT) sequence; and the one or more trans-acting components comprise or are derived from gene products of the R388 (IncW) plasmid. In some embodiments, the bacterial conjugation system is an F plasmid system, and wherein: the at least one cis-acting component comprises an F plasmid origin of transfer (oriT) sequence; and the one or more trans-acting components comprise or are derived from gene products of the F plasmid.

[0023] In some embodiments, the integrator module is derived from a transposase system or a site-directed DNA recombinase system. In some embodiments, the site-directed DNA recombinase system comprises a site-directed integrase system. In some embodiments, the integrator module is derived from a Type I-B, Type I-D, Type I-F, or Type V-K CRISPR-associated transposase system of a bacteria. In some embodiments, the bacteria comprises Vibrio cholera (Vch), Pseudoalteromonas (Pse), or Scytonema hofmanni (Sho). In some embodiments, the integrator module is derived from the Type I-F CRISPR-associated transposase system. In some embodiments, the Type I-F CRISPR-associated transposase system is Tn6677, Tn7000, Tn7001, Tn7002, Tn7003, Tn7004, Tn7005, Tn7006, Tn7007, Tn7008, Tn7009, Tn6900, Tn7010, Tn7011, Tn7012, Tn7013, Tn7014, Tn7015, Tn7016, or Tn7017. In some embodiments, the Type I-F CRISPR-associated transposase system is Tn6677.

[0024] In some embodiments: the one or more components of the integrator module comprise: i) an RNA-guided DNA binding complex, wherein the RNA-guided DNA binding complex comprises one or more Cas proteins, a transposase, one or more crRNAs, or any combination thereof, and ii) a transposition complex comprising one or more transposases; and the first integration sequence of the first and/or second Cassette^{START} comprises an R-TE (RE) and the second integration sequence of the first and/or second Cassette^{STOP} comprises an L-TE (LE).

[0025] In some embodiments, the RE comprises the sequence of any one of SEQ ID NOs: 361 or a sequence having one, two or three mismatches relative to the sequence of any one of SEQ ID NOs: 361 and wherein the LE comprises the sequence of any one of SEQ ID NOs: 362 or a sequence having one, two or three mismatches relative to the sequence of any one of SEQ ID NOs: 362. In some embodiments, the one or more Cas proteins comprise a Cas6 protein, a Cas7 protein, and a Cas8 protein. In some embodiments: the Cas6 protein comprises an amino acid sequence that is at least 80%, 85%, 90%, 95%, 98%, 99%, or 100% identical to SEQ ID NO: 363; the Cas7 protein comprises an amino acid sequence that is at least 80%, 85%, 90%, 95%, 98%, 99%, or 100% identical to SEQ ID NO: 364; and/or the Cas8 protein comprises an amino acid sequence that is at least 80%, 85%, 90%, 95%, 98%, 99%, or 100% identical to SEQ ID NO: 365. In some embodiments, the transposase of the RNA-guided DNA binding complex comprises a TniQ protein. In some embodiments, the TniQ protein comprises an amino acid sequence that is at least 80%, 85%, 90%, 95%, 98%, 99%, or 100% identical to SEQ ID NO: 366. In some embodiments, the one or more transposases of the transposition complex comprise a TnsA protein, a TnsB protein, and a TnsC protein. In some embodiments, the one or more transposases of the transposition complex comprise a TnsAB fusion protein and a TnsC protein. In some embodiments: the TnsA protein comprises an amino acid sequence that is at least 80%, 85%, 90%, 95%, 98%, 99%, or 100% identical to SEQ ID NO: 367; the TnsB protein comprises an amino acid sequences that is at least 80%, 85%, 90%, 95%, 98%, 99%, or 100% identical to SEQ ID NO: 368; and/or the TnsC protein comprises an amino acid sequence that is at least 80%, 85%, 90%, 95%, 98%, 99%, or 100% identical to any one of SEQ ID NOs: 369. In some embodiments, the RNA-guided DNA binding complex comprises one or more helper accessory proteins comprising ClpX and/or ClpP.

[0026] In some embodiments, the one or more crRNAs of the integrator module comprise a scaffold comprising the sequence of SEQ ID NO: 385 and/or wherein the nucleic acid sequence encoding the scaffold of the one or more crRNAs of the integrator module comprises the sequence of SEQ ID NO: 388. In some embodiments, at least one of the one or more crRNAs comprise a spacer that is complementary to a search target sequence on a first strand of the first double stranded target sequence. In some embodiments, at least one of the one or more crRNAs comprise a spacer that is complementary to a search target sequence on a first strand of the second double-stranded target sequence.

[0027] In some embodiments, the integrator module is derived from a Type V-K CRISPR-associated transposase system. In some embodiments: the one or more components of the integrator module comprise: i) an RNA-guided DNA binding complex, wherein the RNA-guided DNA binding complex comprises a Cas protein and one or more crRNAs, or any combination thereof, and ii) a transposition complex comprising one or more transposases; and wherein the first integration sequence of the first and/or second Cassette^{START} comprises an R-TE (RE) and the second integration sequence of the first and/or second Cassette^{STOP} comprises an L-TE (RE). In some embodiments, the Cas protein comprises Cas12k. In some embodiments, the one or more transposases of the transposition complex comprise TniQ, TnsB, TnsC, or any combination thereof. In some embodiments, at least one of the one or more crRNAs comprise a spacer that is complementary to a search target sequence on a first strand of the first double stranded target sequence. In some embodiments, at least one of the one or more crRNAs comprise a spacer that is complementary to a search target sequence on a first strand of the second double-stranded target sequence.

[0028] In some embodiments: the one or more components of the integrator module comprise an integrase. In some embodiments, the integrase is Bxb1 and the first and/or second integration sequences comprise an attB site. In some embodiments: the genome of the recipient cell comprises at least one attP site. In some embodiments: the one or more components of the integrator module comprise an integrase. In some embodiments, the integrase is phiC31 and the first and/or second integration sequences comprise an attB site. In some embodiments: the genome of the recipient cell comprises at least one attP site. In some embodiments: the one or more components of the integrator module comprise a recombinase. In some embodiments, the recombinase is Cre or FLP and the first and/or second integration sequences comprise a loxP site or an FRT site. In some embodiments, wherein: the genome of the recipient cell comprises at least one loxP site or FRT site.

[0029] In some embodiments, the first and/or second Cassette^{START}, the first and/or second Cassette^{STOP} or any combination thereof comprise: one or more marker polynucleotides each comprising a sequence encoding a positive or negative screening and/or selection marker. In some embodiments, the one or more marker polynucleotides are situated 5′ of the at least one cis-acting component of the first and/or second delivery module in the first and/or second Cassette^{START} and/or the one or more marker polynucleotides are situated 5′ of the second integration sequence in the first and/or second Cassette^{STOP}. In some embodiments: the positive screening and/or selection marker is selected from the group comprising: a fluorescent protein, an antibiotic resistance cassette, an enzyme, or any combination thereof. In some embodiments, the enzyme is β-galactosidase. In some embodiments, the negative screening and/or selection marker is selected from the group comprising: a fluorescent protein, an enzyme, or a combination thereof. In some embodiments, the enzyme is encoded by the sacB gene and/or the pheS^{mut} gene. In some embodiments, the antibiotic resistance cassette confers resistance to an antibiotic comprising phleomycin D1 (ZEOCIN™), kanamycin, spectinomycin, streptomycin, ampicillin, carbenicillin, bleomycin, erythromycin, polymyxin B, tetracycline, chloramphenicol, or any combination thereof. In some embodiments, the fluorescent protein comprises green fluorescent protein (GFP), enhanced green fluorescent protein (EGFP), yellow fluorescent protein (YFP), enhanced yellow fluorescent protein (EYFP), blue fluorescent protein (BFP), red fluorescent protein (RFP), TagRFP, Dronpa, Padron, mScarlet, mApple, mCitrine, mCherry, mruby3, rsCherry, rsCherryRev, derivatives thereof, or any combination thereof. In some embodiments, at least one of the one or more marker polynucleotides is flanked by recombinase sites. In some embodiments, the one or more marker polynucleotides of the first Cassette^{START} and/or the first Cassette^{STOP} are flanked by recombinase sites. In some embodiments, the at least one of the one or more marker polynucleotides of the first Cassette^{START} and/or the first Cassette^{STOP} flanked by recombinase sites are capable of being removed from the genome of the recipient cell comprising the chimeric genome upon expression of at least one recombinase or integrase in the recipient cell comprising the chimeric genome. In some embodiments, the at least one recombinase or integrase comprises phiC31, Bxb1, Cre, and/or FLP.

[0030] In some embodiments: one or more of the one or more first helper polynucleotides comprise a first promoter operably linked to the sequence encoding a trans-acting component of the first and/or second delivery module; one or more of the one or more second helper polynucleotides comprise a second promoter operably linked to the sequence encoding a component of an integrator module; one or more of the one or more third helper polynucleotides comprise a third promoter operably linked to the sequence encoding a component of a first orthogonal integrator module; and/or one or more of the one or more fourth helper polynucleotides comprise a fourth promoter operably linked to the sequence encoding a component of a second orthogonal integrator module. In some embodiments, the first, second, third, and/or fourth promoters are the same or different. In some embodiments, the first, second, third, and/or fourth promoters comprise a constitutive promoter, an inducible promoter, or a combination thereof.

[0031] In some embodiments, the first, second, third, and/or fourth promoters comprises the TlpA operator/promoter, lambda phage pL, lambda phage pR, lambda phage pRM, or any combination thereof. In some embodiments, the first, second, third, and/or fourth promoters comprise a promoter selected from the group comprising: a bacteriophage promoter, (e.g., Pls1con, T3, T7, SP6, or PL); a bacterial promoter, (e.g., Pbad, PmgrB, Ptrc2, Plac/ara, Ptac, or Pm); and/or a bacterial-bacteriophage hybrid promoter, (e.g., PLlacO or PLtetO). In some embodiments, the first, second, third, and/or fourth promoters comprise a positively regulated E. coli promoter selected from the group comprising: a σ⁷⁰ promoter, (e.g., inducible pBad/araC promoter, Lux cassette right promoter, modified lambda Prm promoter, plac Or2-62 (positive), pBad/AraC with extra REN sites, pBad, P(Las) TetO, P(Las) CIO, P(Rhl), Pu, FecA, pRE, cadC, hns, pLas, or pLux); a σ^{S} promoter, (e.g., Pdps); a σ³² promoter, (e.g., heat shock); and/or a σ⁵⁴ promoter, (e.g., glnAp2). In some embodiments, the first, second, third, and/or fourth promoters comprise a negatively regulated E. coli promoter selected from the group comprising: a σ⁷⁰ promoter, (e.g., Promoter (PRM+), modified lambda Prm promoter, TetR-TetR-4C P(Las) TetO, P(Las) CIO, P(Lac) IQ, RecA_DlexO_DLacOl, dapAp, FecA, Pspac-hy, pcI, plux-cI, plux-lac, CinR, CinL, glucose controlled, modifed Pr, modifed Prm+, FecA, Pcya, rec A (SOS), Rec A (SOS), EmrR_regulated, BetI_regulated, pLac_lux, pTet_Lac, pLac/Mnt, pTet/Mnt, LsrA/cI, pLux/cI, LacI, LacIQ, pLacIQ1, pLas/cI, pLas/Lux, pLux/Las, pRecA with LexA binding site, reverse BBa_R0011, pLacI/ara-1, pLaclq, rrnB P1, cadC, hns, PfhuA, pBad/araC, nhaA, OmpF, or RcnR); a σ^{S} promoter, (e.g., Lutz-Bujard LacO with alternative sigma factor σ³⁸); a σ³² promoter, (e.g., Lutz-Bujard LacO with alternative sigma factor σ³²); and/or a σ⁵⁴ promoter, (e.g., glnAp2). In some embodiments, the first, second, third, and/or fourth promoters comprise a P7 promoter. In some embodiments, the first, second, third, and/or fourth promoters comprise a heat-shock promoter, (e.g., pTSR, pR-pL, GrpE, HtpG, Lon, RpoH, Clp, and/or DnaK). In some embodiments, the first, second, third, and/or fourth promoters comprise a constitutive Escherichia coli as promoter, (e.g., osmY promoter (BBa_J45993)); a constitutive Escherichia coli σ³² promoter (e.g., htpG heat shock promoter (BBa_J45504)); a constitutive Escherichia coli σ⁷⁰ promoter (e.g., lacq promoter (BBa_J54200 or BBa_J56015), E. coli CreABCD phosphate sensing operon promoter (BBa_J64951), GlnRS promoter (BBa_K088007), lacZ promoter (BBa_K119000 or flfa_K119001), M13K07 gene I promoter (BBa_M13101), M13K07 gene II promoter (BBa_M13102), M13K07 gene III promoter (BBa_M13103), M13K07 gene IV promoter (BBa_M13104), M13K07 gene V promoter (BBa_M13105), M13K07 gene VI promoter (BBa_M13106), M13K07 gene VIII promoter (BBa_M13108), or M13110 (BBa_M13110)); a constitutive Bacillus subtilis σ^{A} promoter (e.g., promoter veg (BBa_K143013), promoter 43 (BBa_K143013), P_{liaG} (BBa_K823000), P_{lepA} (BBa_K823002), or P_{veg}(BBa_K823003)); a constitutive Bacillus subtilis σ^{B} promoter, (e.g., promoter ctc (BBa_K143010) or promoter gsiB (BBa_K143011)); a Salmonella promoter (e.g., Pspv2 from Salmonella (BBa_K112706) or Pspv from Salmonella (BBa_K112707)); a bacteriophage T7 promoter (e.g., BBa_I712074, BBa_1719005, BBa_J34814, BBa_J64997, BBa_K113010, BBa_K113011, BBa_K113012, BBa_R0085, BBa_R0180, BBa_R0181, BBa_R0182, BBa_R0183, BBa_Z0251, BBa_Z0252, or BBa_Z0253); and/or a bacteriophage SP6 promoter, (e.g., SP6 promoter (BBa_J64998)). In some embodiments, the first, second, third, and/or fourth promoters comprise an Arabinose inducible promoter (P^{Ara}).

[0032] In some embodiments: the one or more first helper polynucleotides are situated on the same nucleic acid or different nucleic acids; and/or the one or more second helper polynucleotides are situated on the same nucleic acid or different nucleic acids. In some embodiments: two or more of the one or more first helper polynucleotides situated on the same nucleic acid, two or more of the one or more second helper polynucleotides situated on the same nucleic acid, two or more of the one or more third helper polynucleotides comprised within the first orthogonal integration vector, and/or two or more of the one or more fourth helper polynucleotides comprised within the second orthogonal integration vector, are comprised within an operon or operably linked via a tandem expression element. In some embodiments, the tandem expression element is selected from the group comprising a bacterial ribosome binding site (RBS), an internal ribosomal entry site (IRES), foot-and-mouth disease virus 2A peptide (F2A), equine rhinitis A virus 2A peptide (E2A), porcine teschovirus 2A peptide (P2A) or Thosea asigna virus 2A peptide (T2A), or any combination thereof.

[0033] In some embodiments, any of the one or more first helper polynucleotides, the one or more second helper polynucleotides, the one or more third helper polynucleotides, the one or more fourth helper polynucleotides, and/or the bacterial operon comprise a 5′UTR and/or a 3′ UTR. In some embodiments, the one or more first helper polynucleotides, the one or more second helper polynucleotides, the one or more third helper polynucleotides, and/or the one or more fourth helper polynucleotides comprise a transcript stabilization element.

[0034] In some embodiments, the one or more first helper polynucleotides or the one or more second helper polynucleotides are comprised within one or more vectors. In some embodiments, the one or more vectors, the first orthogonal vector, and/or the second orthogonal vector comprise an RNA viral vector, a DNA viral vector, a plasmid vector, an artificial chromosome, or any combination thereof.

[0035] In some embodiments: i) the first and/or second Cassette^{START} comprises the sequence of SEQ ID NO: 370 or a sequence that is at least 80%, 85%, 90%, 95%, 98%, 99%, or 100% identical to SEQ ID NO: 370; ii) the first and/or second Cassette^{STOP} comprises the sequence of SEQ ID NO: 371 or a sequence that is at least 80%, 85%, 90%, 95%, 98%, 99%, or 100% identical to SEQ ID NO: 371; iii) the first and/or second Cassette^{START} flanked by a 5′ RE and a 3′ LE and comprises the sequence of any one of SEQ ID NOs: 372-373 or a sequence that is at least 80%, 85%, 90%, 95%, 98%, 99%, or 100% identical to any one of SEQ ID NOs: 372-373; and/or iv) the first and/or second Cassette^{STOP} flanked by a 5′ RE and a 3′ LE comprises sequence of any one of SEQ ID NOs: 374-375 or a sequence that is at least 80%, 85%, 90%, 95%, 98%, 99%, or 100% identical to any one of SEQ ID NOs: 374-375.

[0036] In some embodiments: the two or more first helper polynucleotides comprised within an operon or operably linked via a tandem expression element comprise the sequence of SEQ ID NO: 376 or a sequence that is at least 80%, 85%, 90%, 95%, 98%, 99%, or 100% identical to any one of SEQ ID NO: 376; the two more second helper polynucleotides comprised within an operon or operably linked via a tandem expression element comprise the sequence of SEQ ID NO: 377 or a sequence that is at least 80%, 85%, 90%, 95%, 98%, 99%, or 100% identical to any one of SEQ ID NO: 377; the two or more third helper polynucleotides comprised within an operon or operably linked via a tandem expression element comprise the sequence of SEQ ID NO: 378 or a sequence that is at least 80%, 85%, 90%, 95%, 98%, 99%, or 100% identical to any one of SEQ ID NO: 378; and/or the two or more fourth helper polynucleotides comprised within an operon or operably linked via a tandem expression element comprise the sequence of SEQ ID NO: 379 or a sequence that is at least 80%, 85%, 90%, 95%, 98%, 99%, or 100% identical to any one of SEQ ID NO: 379.

[0037] In some embodiments: i) the two or more first helper polynucleotides are comprised within a plasmid, and wherein the plasmid comprises the sequence of SEQ ID NO: 380; ii) the two more second helper polynucleotides are comprised within a plasmid, and wherein the plasmid comprises the sequence of SEQ ID NO: 381; iii) the first orthogonal integration vector comprises the sequence of SEQ ID NO: 382; and/or iv) the second orthogonal integration vector comprises the sequence of SEQ ID NO: 383.

[0038] Provided herein are kits comprising any of the systems or nucleic acid compositions of the disclosure, and set of instructions for use.

[0039] Disclosed herein are methods for producing a chimeric genome. In some embodiments, the method comprises: contacting a recipient cell disclosed herein with a donor cell disclosed herein, and: expressing the one or more trans-acting components of the first delivery module in the donor cell, thereby the sequence defined by the genomic transfer window is transferred from the donor cell to the recipient cell and thereby the first donor genomic segment comprising the first donor sequence flanked by the first integration sequence and the second integration sequence of the first Cassette^{START} and the first Cassette^{STOP} is generated in the recipient cell; and expressing the one or more components of the integrator module in the recipient cell, thereby the first donor genomic segment is inserted into the first double-stranded target sequence in the genome of the recipient cell, thereby generating the chimeric genome in the recipient cell.

[0040] The method can comprise repeating the contacting step one or more times, wherein each contacting step comprises contacting an nth-donor cell with the recipient cell, thereby generating a recipient cell comprising an n-meric genome, wherein each nth-donor cell comprises: (i) an nth start cassette (Cassette^{START}) comprising, from 5′ to 3′, at least one cis-acting component of an nth delivery module and an nth integration sequence, and (ii) an nth stop cassette (Cassette^{STOP}) comprising, from 5′ to 3′, an nth integration sequence and at least one cis-acting component of the nth delivery module, wherein the nth Cassette^{START} is integrated at a first site in the genome of the nth donor cell and the nth Cassette^{STOP} is integrated at a second site in the genome of the nth donor cell, wherein intervening sequence between the nth Cassette^{START} and the nth Cassette^{STOP} defines an nth genomic transfer window; and (iii) one or more trans-acting components of the nth delivery module or one or more first helper polynucleotides each comprising a sequence encoding a trans-acting component of the nth delivery module, wherein the nth delivery module comprises the one or more trans-acting components, and optionally wherein the sequence of each nth genomic transfer window is different from each other.

[0041] Disclosed herein are methods for producing a trimeric genome. In some embodiments, the method comprises: (a) contacting a recipient cell of the disclosure with the donor cell of the disclosure, and: expressing the one or more trans-acting components of the first delivery module in the donor cell, thereby the sequence defined by the genomic transfer window is transferred from the donor cell to the recipient cell and thereby the first donor genomic segment comprising the first donor sequence flanked by the first integration sequence and the second integration sequence of the first Cassette^{START} and the first Cassette^{STOP} is generated in the recipient cell; and expressing the one or more components of the integrator module in the recipient cell, thereby the first donor genomic segment is inserted into the first double-stranded target sequence in the genome of the recipient cell, thereby generating the chimeric genome in the recipient cell, and (b) contacting the recipient cell comprising the chimeric genome with a second donor cell of the disclosure, and: expressing the one or more trans-acting components of the second delivery module in the second donor cell, thereby the sequence defined by the second genomic transfer window is transferred from the second donor cell to the recipient cell comprising the chimeric genome and thereby the second donor genomic segment comprising the second donor sequence flanked by the first integration sequence and the second integration sequence of the second Cassette^{START} and the second Cassette^{STOP} is generated in the recipient cell comprising the chimeric genome; and expressing the one or more components of the integrator module in the recipient cell comprising the chimeric genome, thereby the second donor genomic segment is inserted into the second double-stranded target site in the genome of the recipient cell comprising the chimeric genome, thereby generating the trimeric genome in the recipient cell comprising the chimeric genome, optionally wherein the second double-stranded target site is comprised within the first donor genomic segment.

[0042] In some embodiments, prior to the contacting of step (b), the method comprises expressing at least one recombinase or integrase in the recipient cell comprising the chimeric genome, thereby the at least one of the one or more marker polynucleotides of the first Cassette^{START} and/or the first Cassette^{STOP} flanked by recombinase sites are removed from the genome of the recipient cell comprising the chimeric genome. In some embodiments, the ratio of the donor cell to the recipient cell is approximately 4:1 (v/v) and/or the ratio of the second donor cell to the recipient cell comprising the chimeric genome is approximately 4:1 (v/v). In some embodiments, the first and/or second donor genomic segment is inserted into the first and/or second double-stranded target sequence in the genome of the recipient cell and/or the genome of the recipient cell comprising the chimeric genome at an integration efficiency of at least 10⁴ CFU. In some embodiments, the method has an on-target insertion rate of at least 90%.

[0043] Disclosed herein are genome-expanded organisms. In some embodiments, the genome-expanded organism comprises a chimeric genome, trimeric genome, or n-meric genome generated by a method provided herein. In some embodiments, the chimeric, trimeric genome, or n-meric genome is stable following at least 100 generations.

### BRIEF DESCRIPTION OF THE DRAWINGS

[0044] The patent or application file contains at least one drawing executed in color. Copies of this patent or patent application publication with color drawing(s) will be provided by the Office upon request and payment of the necessary fee.

[0045] FIG. 1A-FIG. 1B are related to the design and overview of ACE. FIG. 1A displays a schematic representation of the ACE system, including the Cassette^{START}, Cassette^{STOP} pAra-Trans, and pAra-CAST components. Cassette^{START} contains genes conferring sucrose susceptibility (sacB/−1) and chloramphenicol resistance (cm^{R}/+1), a RK24 origin of transfer (oriT), and the right end (RE) of Tn6677. Cassette^{STOP} contains genes for p-chlorophenylalanine susceptibility (pheS/−2) and hygromycin resistance (hygroR/+2), a green fluorescent protein (gfp) gene, a RK24 oriT, and the left end (LE) of Tn6677. Cassette^{START} and Cassette^{STOP} can be contained in pOrthoCAST-1 and pOrthoCAST-2 plasmids, respectively. pAra-Trans encodes RK24 conjugation machinery under an arabinose-inducible (P^{Ara}) promoter on a BAC vector conferring apramycin resistance (apraR/+3). pAra-CAST encodes the RNA-guided Tn6677 transposase under p^{Ara} and a constitutively expressed Tn6677 crRNA on a spec^{R}/+4 CDF replication backbone. FIG. 1B depicts an overview of the ACE process: (i) Cassette^{START} and Cassette^{STOP}, either in the form of PCR products or contained in plasmids are integrated into the donor genome to demarcate the transfer window; (ii) pAra-Trans is introduced into the donor strain to prime for conjugation; (iii) pAra-CAST is introduced into the recipient strain to prime for integration; (iv) Donor and recipient strains are mixed and pAra-Trans/pAra-CAST are induced with arabinose; (v) Single-stranded DNA (ssDNA) is transferred from the donor to the recipient, initiating at the oriT in Cassette^{START} and terminating at the oriT in Cassette^{STOP}; (vi) The ssDNA circularizes and is converted to double-stranded DNA (dsDNA) in the recipient. The CAST complex then integrates the dsDNA into the recipient genome in a crRNA-dependent manner. Two integration outcomes (RE-LE and LE-RE integrants) in cell Y are possible due to the bidirectional transposition properties of CASTs; (vii) Successful ACE events are identified through antibiotic selection and gfp marker screening.

[0046] FIG. 2A-FIG. 2G display non-limiting exemplary data related to the validation and characterization of ACE. As shown in FIG. 2A, Cassette^{START} and Cassette^{STOP} are integrated into different locations flanking a synthetic DNA segment (Syn100) on the E. coli DH10B genome. Cassette^{START} insertion occurs at a fixed site (locus¹). Cassette^{STOP} can be inserted at three distinct locations (locus^{2a}, locus^{2b}, or locus^{2c}) to create donor strains for variable transfer lengths: 10, 50, or 100-kb. As shown in FIG. 2B, recipient E. coli DH10B^{Δdif::lux} strains are engineered with plasmids encoding diverse crRNAs (colored squares), each targeting specific integration sites (colored triangles). Color association (TS1: purple, TS2: blue, and TS3: pink) distinguishes between crRNAs and target sites. FIG. 2C displays exemplary data related to ACE efficiency, measured by GFP+ colony forming units (c.f.u.) per experiment as a function of Syn100 transfer lengths up to 100-kb. FIG. 2D displays data related to ACE specificity, calculated as the percentage of lux-/GFP+c.f.u. resulting from on-target integration into different positions within the lux operon (crRNA^{TS2}, crRNA^{luxA*}, crRNA^{luxB1}, crRNA^{luxB2}) Precision of 10 and 50-kb transfers were assessed only with crRNA^{TS2} and ΔcrRNA while 100-kb was also assessed with the three variant crRNAs. FIG. 2E displays results of colony PCR interrogating the orientation and integrity of a Syn100 integration (100-kb) into the recipient genome at the TS2 site. Two primer sets verify junctions between (i) transferred DNA and the recipient genome and (ii) internal regions within the Syn100 segment. FIG. 2F displays exemplary results from Tn-seq analysis revealing on-target RE-LE/LE-RE ACE integration frequency at TS1, TS2, and TS3 across all transfer lengths (10, 50, and 100-kb). Off-target events are represented by colored circles corresponding to target sites. FIG. 2G shows heat maps of integration site distributions (x-axis), measured in percent reads mapped, for 10, 50 and 100-kb Syn100 donor cargo integrations at TS1 (purple), TS2 (blue) and TS3 (pink) as determined by Tn-seq of transfer populations. Note: Efficiency and specificity are presented as the mean±standard deviation of n=3 independent experiments, with individual values displayed as white circles.

[0047] FIG. 3A-FIG. 3O display non-limiting exemplary data showing ACE enables modular and scalable megabase-scale additions between synthetic and natural strains to create transcriptionally active genomic chimeras. FIG. 3A displays a diagram of seg. 5 transfer from Syn61 to DH10B^{Δdif::lux} at TS3 (pink rectangle-triangle). Chimeric genome represented as the TE-flanked Syn61 segment (red) integrated into the DH10B genome (gray). FIG. 3B shows genome-wide read coverages (RPGC) for the seg. 5 chimeric strain. Syn61 genomic segments shaded in pink, and homologous DH10B genomic segments shaded in dark-gray. Non-redundant sections of the E. coli genome shaded in light-gray; TS3 target site depicted by the pink triangle. Read fraction mapping to the Syn61 and homologous DH10B segments set above the coverage plot.

[0048] FIG. 3C-FIG. 3D show diagrams and charts as in FIG. 3A-FIG. 3B, but depicting seg. 4 transfer at TS3 (pink). FIG. 3E-FIG. 3F show diagrams and charts as in FIG. 3A-FIG. 3B, but depicting seg. 3 transfer at TS3 (pink), which is centered around the oriC of Syn61. The genomic chimera produced by this transfer has an ectopic oriC inserted at the TS3 region, which forms an additional peak in read coverage alongside the wild type oriC. Dark gray and pink arrows illustrate the two sets of replication forks emanating from the WT and ectopic oriCs, respectively. FIG. 3G-FIG. 3H show diagrams as in FIG. 3A-FIG. 3B, but depicting seg. 2 transfer at TS1 (purple). FIG. 3I-FIG. 3J show diagrams and charts as in FIG. 3A-FIG. 3B, but depicting seg. 1 transfer at TS2 (blue). FIG. 3K displays genome-wide mapping of Syn61 genes (pink) to corresponding DH10B homologs (dark-gray) in the seg. 1 Chimeric genome. DH10B and Syn61 homolog-pairs connect by pink/yellow lines. FIG. 3L displays hierarchical clustering of transcript counts (log(TPM+1)) of Syn61 and DH10B homologs in DH10B, Chimeric and Syn61 strains. FIG. 3M shows genome-wide scatterplot (top) and heat-map (bottom) of positional expression (log(TPM+1)) of each Syn61 (pink) and DH10B (dark-gray) homolog within the Chimeric strain. FIG. 3N shows expression distribution (log(TPM+1)) of Syn61 (pink) and DH10B (dark-gray) homologs in DH10B, Chimeric and Syn61 strains. Asterisks represent statistical outliers. FIG. 3O displays differential expression of redundant (red) and non-redundant (pink) genes between Chimeric and DH10B background strains. The log 2 of the fold-change of redundant (red) and non-redundant (pink) genes are plotted alongside their respective −log₁₀ adjusted p-value. P-value cutoff set at 10-3 and log 2 fold-change cutoff set to 1; points below the cutoff are in gray. Note: Transcript counts and differential expression are derived from up to n=3 independent samples.

[0049] FIG. 4A-FIG. 4K display non-limiting exemplary data related to the creation of cross-genus genomic chimeras and trimeras. FIG. 4A depicts a diagram of ˜1-Mb S. flexneri to E. coli DH10B and MDS42 at the dif site (TS: gray rectangle-triangle). Chimeric genomes represented as the TE-flanked S. flexneri segment (dark-blue) integrated into DH10B and MDS42 genomes (light-/dark-gray). FIG. 4B shows genome-wide read coverages (RPGC) for E. coli DH10B+1-Mb S. flexneri (top) and E. coli MDS42+1-Mb S. flexneri (bottom) chimeric strains as in FIG. 3B, but with a dif target (TS: gray triangle). Shown in FIG. 4C is genome-wide mapping of S. flexneri gene variants given in blue to their corresponding E. coli wild-type homologs given in dark gray in the E. coli+1-Mb S. flexneri chimeric genome with a R-L integration orientation. Pairs of DH10B and Shigella homologs are connected by either blue or light gray lines. FIG. 4D shows expression distribution of bulk S. flexneri transcripts (blue) compared to bulk homologous E. coli transcripts (gray) in DH10B, MDS42, S. flexneri, and Chimeric strains measured in log(TPM+1). Distributions are based on the data from n 3 biologically independent samples. Edges of boxes close to zero represent outliers that are the result of bioinformatic and sequencing artifacts with no biological significance. FIG. 4E shows hierarchical clustering of transcript counts, measured in log(TPM+1) in the S. flexneri, Chimeric and MDS42 strains, of S. flexneri gene homologs originally deleted in the MDS42 strain background that are reconstituted via ACE chimerization with S. flexneri. Three individual replicates are shown for each strain. Genes are clustered based on expression level within each genomic background. Shown in FIG. 4F is positional heat map of expression in log(TPM+1) of two unique gene-rich S. flexneri loci in DH10B, MDS42, S. flexneri, and their respective E. coli+1-Mb S. flexneri chimeras. FIG. 4G displays a diagram of the stepwise ACE synthesis of a tripartite-genome-chimera (trimera) between E. coli DH10B, E. coli Syn61 and S. flexneri. In a two-step process, S. flexneri segment (dark-blue; step 2) integration into the DH10B+2-Mb Syn61 dif site (TS′: pink rectangle; generated in step 1) results in a 7.4-Mb trimeric genome. FIG. 4H displays phase-contrast confocal microscopy of synthesized chimeras. Scale bar is provided in the S. flexneri image. Shown in FIG. 4I is genome-wide read coverage (RPGC) for the DH10B+2-Mb Syn61 chimeric and the +1-Mb S. flexneri trimeric strains as in FIG. 3B. S. flexneri genomic segments shaded in blue; Syn61 and DH10B segments are respectively shaded in pink and gray, with TS/TS' given by gray/pink triangles. FIG. 4J depicts data of the expression distribution of bulk Syn61 transcripts (pink), S. flexneri transcripts (blue) compared to bulk homologous DH10B transcripts (gray) in DH10B, S. flexneri, Syn61, Chimeric and Trimeric strains measured in log(TPM+1). Distributions are based on the data from n 3 biologically independent samples. Edges of boxes close to zero represent outliers that are the result of bioinformatic and sequencing artifacts with no biological significance. Shown in FIG. 4K is differential expression of 3-fold (blue), 2-fold redundant genes (red) and non-redundant genes (black) between the trimeric strain and the DH10B background strain. The log 2 of the ratio of the expression level of the 3-fold and 2-fold redundant genes in the trimeric strain to the expression level of their homolog in the DH10B strain (blue and red) is plotted alongside log 2 of the ratio of the expression level of non-redundant genes in the trimeric strain to the expression level of its homolog in the DH10B strain (black). Points are also plotted based on their −log₁₀ adjusted p-value. P-value cutoff was set at 0.001 and the log 2 fold-change cutoff was set to ±1 so that points below the cutoff are in gray.

[0050] FIG. 5A-FIG. 5I display non-limiting exemplary data related to the creation of cross-order and cross-class genome chimeras. FIG. 5A shows a simplified phylogenetic tree of Alphaproteobacteria and Gammaproteobacteria illustrating relationships between tested ACE donors and recipients. Cross-genus and cross-order transfers from Shigella to Escherichia, Escherichia to Vibrio and Pseudomonas to Escherichia are respectively shown by dark blue, purple and light blue arrows. The tree shows cross-class transfer from Escherichia to Agrobacterium through a dark pink arrow. The direction of the arrow denotes the direction of transfer. FIG. 5B displays a diagram of 100-kb E. coli Syn61 transfer to A. tumefaciens and corresponding genome-wide read coverage for the outcome chimeric genome with integration 100-kb Syn61 into the A. tumefaciens genome at the genomic dif site. The Syn61 genome is depicted by the red circle and the A. tumefaciens genomes are depicted with chromosome 1 as a yellow circle and chromosome 2 as an orange segment. Shown in FIG. 5C is a diagram of TE-flanked 1-Mb E. coli MDS42 segment (dark-gray) transfer to V natriegens (Chr.1 dark-purple; Chr.2: light-purple) genome at either Chr.1 TS^{C1} or Chr.2 TS^{C2} chromosomal dif-targets (dark-/light-purple triangles). FIG. 5D shows the genome-wide read coverage (RPGC) for the V. natriegens chr.1+1-Mb MDS42 and V. natriegens chr.2+1-Mb MDS42 chimeric strains as in FIG. 3B, but with TS^{C1}/TS^{C2} respectively given by dark/light purple triangles. FIG. 5E shows expression distribution of bulk V. natriegens transcripts (purple) compared to bulk E. coli transcripts (gray) in MDS42, V. natriegens, and 1-Mb MDS42 Chimeric Vibrio strains measured in log(TPM+1). Distributions are based on the data from n 3 biologically independent samples. Edges of boxes close to zero represent outliers that are the result of bioinformatic and sequencing artifacts with no biological significance. Shown in FIG. 5F is a diagram of 522-kb P. protegens pf-5 transfer into E. coli DH10B. The P. protegens genome is depicted by the blue circle and the E. coli genomes are depicted with the gray circle. Genome integration sites TS4, dif and TS3 are indicated by their respective colored rectangle triangles. FIG. 5G shows a diagram as in FIG. 5F, but for the 415-kb P. protegens pf-5 transfer to E. coli DH10B into genomic sites TS2 and dif.

[0051] FIG. 5H shows the genome-wide read coverages for the E. coli DH10B chimeric genomes with integration of 522-kb P. protegens at TS4, dif and TS3 genomic loci, respectively. Transferred DNA is highlighted in blue and integration sites indicated with colored triangles. FIG. 5I shows data as in FIG. 5H, but genome-wide read coverages for 415-kb P. protegens transfer into E. coli DH10B at the dif and TS2 genomic loci, respectively.

[0052] FIG. 6A-FIG. 6H display non-limiting exemplary data showing functional interaction and multi-omics of megabase-scale P. protegens-E. coli chimeras uncover emergent metabolic landscape. FIG. 6A displays results of a hemolysis phenotype assay of 522-kb P. protegens-E. coli chimeras on LB agar and Columbia agar supplemented with 5% v/v defibrinated sheep blood. Shown in FIG. 6B is a 3D MS1 heatmap of P. protegens and E. coli DH10B showing m/z vs. retention time vs. intensity landscape. FIG. 6C displays a 3D MS1 heatmap of 415-kb P. protegens TS2 and dif E. coli DH10B chimeras showing m/z vs. retention time vs. intensity landscape. FIG. 6D depicts m/z peaks at representative retention times for the 415-kb P. protegens dif E. coli DH10B chimera compared to the control donor and recipient bacteria. Shown in FIG. 6E is a Venn diagram of distinct m/z peaks in E. coli DH10B, P. protegens pf-5 and 415-kb P. protegens-E. coli TS2 and dif chimera highlighting the set of metabolites unique to and shared with between the bacteria. FIG. 6F shows the distribution of unique m/z counts shared between experimental replicates of 415-kb P. protegens chimera. FIG. 6G shows a diagram as in FIG. 5F, but for the 522-kb P. protegens pf-5 transfer to 415-kb P. protegens dif E. coli DH10B into genomic TS3 site. FIG. 6H shows data as in FIG. 5H, but genome-wide read coverages for the 937-kb P. protegens-E. coli genome chimera.

[0053] FIG. 7A-FIG. 7H display non-limited exemplary data related to the detailed characterization of the fidelity and specificity of Syn100 transfers with ACE. FIG. 7A shows representative plates of 100-kb Syn100 ACE transfers into TS1-3 in E. coli DH10B Δdif::lux. The top panel shows colony luminescence while the bottom panel shows colony fluorescence under blue light. The 10⁻⁴ dilution plate was shown for each experiment. FIG. 7B shows genotyping colony PCR gels for six integrant colonies of the 100-kb Syn100 transfer into the DH10B Δdif::lux TS1 site. In the schematic above the gel, the red rectangle represents the Syn100 insert, the yellow boxes represent the LE and RE, and the purple rectangles represent the TS1 site. The integration site in TS1 targeted by crRNA^{TS1} is shown with a purple triangle. The right and left junctions for a RL integration are checked with primers specific to TS1 and the Syn100 segment, shown as blue and red arrows, respectively. D and R denote donor and recipient controls in each assay. Lengths of each PCR product are shown above each set of arrows in the schematic. FIG. 7C displays sanger sequencing traces for the newly formed transposition junctions detected by genotyping colony PCR of clone 1 in b. for the 100-kb Syn100 transfer into DH10B Δdif::lux. FIG. 7D shows genotyping colony PCR gels as in FIG. 7B, but genotyping the same six integrant colonies for the right and left junctions for a LR integration, represented with the blue and red arrow pairs. FIG. 7E shows genotyping colony PCR gels as in FIG. 7B, but genotyping the same six integrant colonies for two internal stretches of the Syn100 transfer with primer pairs denoted by the blue and red arrow pairs priming within the Syn100 region. FIG. 7F shows genotyping colony PCR gels as in FIG. 7B, but genotyping colony PCR for six integrant colonies of the 100-kb Syn100 transfer into DH10B Δdif::lux TS3 site for the right and left junctions for a RL integration, represented with the blue and red arrow pairs. FIG. 7G shows genotyping colony PCR gels as in FIG. 7E, but genotyping the six integrant colonies of the 100-kb Syn100 transfer into DH10B Δdif::lux TS3 site for two internal stretches of the Syn100 transfer with primer pairs denoted by the blue and red arrow pairs priming within the Syn100 region. Shown in FIG. 7H are growth and fluorescence of Syn100 donor (D), DH01B recipient (R) and the chimeric outcome strains (1-6) for each of the three integration positions (TS1-3) on different solid growth media conditions. Cells were spotted LB agar supplemented with one of the following in order from top to bottom (100 μg/ml streptomycin, 200 μg/ml hygromycin, 2.5 mM 4-chlorophenylalanine, 25 μg/ml chloramphenicol, 7.5% w/v sucrose, 50 μg/ml spectinomycin, 50 μg/ml apramycin). Chemiluminescence and fluorescence of the spotted colonies was assessed on the streptomycin condition.

[0054] FIG. 8A-FIG. 8I show non-limiting exemplary data related to the description and demonstration of Tn-seq methodology and characterization of mutant CAST insertion behaviors with the Syn100 donor. Shown in FIG. 8A is the Tn-seq workflow; (1) Bacterial colonies formed by ACE transfer on selective agar plates are (2) scraped and collected for genomic DNA extraction. A subpopulation of the extracted DNA contains fragments carrying transposon ends (TEs), denoted in beige, as a hallmark of a conjugative CAST event. (3) DNA fragments are randomly tagged with adapters and fragmented (tagmented) using bead-linked transposomes using routine library preparation protocols to append 5′ and 3′ sequences for standard sequencing primer annealing (blue and green). (4) Indices, P5 and P7 adapters are then added using a custom PCR-based library amplification step that allows for enrichment of sequences containing TEs from the total population of tagmented DNA. Briefly, custom primers containing the P5 adapter sequence (pink) as well as an index sequence (purple) were designed to anneal to the RE of the transposon (beige) were paired with a standard primer containing a P7 adapter (orange) and an index sequence (dark purple) which anneals to the standard sequencing primer binding site (blue) in a low cycle PCR. (5) This TE-enriched sequencing library is then sequenced on a MiSeq using a custom sequencing primer that anneals to the RE. FIG. 8B shows genome-wide distribution of Tn-seq reads, measured in percent reads, from ACE transfer experiments of 10-kb, 50-kb and 100-kb Syn100 cargoes into TS1 (purple bars), TS2 (blue bars) and TS3 (pink bars). Locations of each target site are given by triangles of the appropriate color. Genome coordinates are plotted with the origin of replication (oriC) as the zeroth coordinate. FIG. 8C shows integration orientation for ACE transfer experiments of 10-kb, 50-kb and 100-kb Syn100 cargoes into TS1 (purple, left bars for each length), TS2 (blue, middle bars for each length) and TS3 (pink, right bars for each length) given in percent Tn-seq reads. RL integration is given in blue and LR integration is given in light blue. Shown in FIG. 8D is the genome-wide distribution of off-target Tn-seq reads for ACE transfer experiments of 100-kb Syn100 cargo into TS1 (purple circles), TS2 (blue circles) and TS3 (pink circles). Frequency of off-target integration is given as a read fraction normalized to the most frequent off-target integration position. The most frequent off-target integration position for each of the TS1-3 experiments is additionally labeled with the percent reads in the Tn-seq mapping to said position. Genome coordinates are plotted with the origin of replication (oriC) as the zeroth coordinate. FIG. 8E displays a diagram illustrating the variants of the pAra-CAST plasmids used in 100-kb Syn100 cargo transfers and corresponding efficiency of ACE transfer with each variant, measured in GFP+ c.f.u. Data is shown as the mean±s.d. for n=3 biologically independent samples. Shown in FIG. 8F is the genome-wide distribution of Tn-seq reads for ACE transfer of 100-kb Syn100 cargo with pAra-CAST-crRNA^{NT}. Frequency of integration is given as a read fraction normalized to the most frequent integration position. The most frequent integration position is additionally labeled with the percent reads in the Tn-seq mapping to said position. Genome coordinates are plotted with the origin of replication (oriC) as the zeroth coordinate. FIG. 8G is similar to FIG. 8F but shows genome-wide distribution of Tn-seq reads for ACE transfer of 100-kb Syn100 cargo with pAra-CAST-ΔcrRNA. FIG. 8H is similar to FIG. 8F, but shows genome-wide distribution of Tn-seq reads for ACE transfer of 100-kb Syn100 cargo with pAra-CAST-Δcascade. FIG. 8I is similar to FIG. 8F but shows genome-wide distribution of Tn-seq reads for ACE transfer of 100-kb Syn100 cargo with pAra-CAST-ΔQcascade.

[0055] FIG. 9A-FIG. 9G display non-limiting exemplary data showing ACE enables megabase-scale additions between synthetic and natural strains. FIG. 9A shows a depiction of the synthetic E. coli Syn6l donor genome (pink ring), recoded across 18,000 codons in the MDS42 genome (gray ring). Three transfer windows (red segments) are defined for 100-kb, 600-kb and 1-Mb centered around the dif site of Syn61. FIG. 9B displays diagrams representing 100-kb, 600-kb and 1-Mb Syn6l insertions at TS1, TS2 and TS3 E. coli DH10B recipients. Unstable chimeric genomes are grayed out and set behind their stable counterparts for 600-kb and 1-Mb Syn6l transfers. FIG. 9C shows a graph of ACE transfer efficiency, measured in GFP+c.f.u., of 100-kb, 600-kb and 1-Mb Syn6l transfers in recipient strains (TS1: purple, TS2: blue, TS3: pink, crRNA^{NT}: light-gray, ΔcrRNA: gray, and ΔCAST: dark-gray). FIG. 9D shows schematics and data related ACE specificity at TS2 target site for 100-kb, 600-kb and 1-Mb Syn6l transfers. On the left, representation of the TS2 locus with 100-kb, 600-kb and 1-Mb insertions (red). ACE precision calculated as the percentage of lux-GFP+c.f.u. out of total GFP+c.f.u. Data shown as the mean±s.d. for n=3 biologically independent samples; sample values are reported as white circles. FIG. 9E shows the genome-wide distribution of Tn-seq reads, measured in percent reads, from ACE transfer experiments of 100-kb, 600-kb and 1-Mb integrations into TS1 (purple), TS2 (blue) and TS3 (pink). Data represented as in FIG. 2F. FIG. 9F shows heat maps of integration site distributions, measured in percent reads mapped, for 100-kb, 600-kb and 1-Mb integrations at TS1 (purple), TS2 (blue) and TS3 (pink) as determined by Tn-seq. Shown in FIG. 9G are genome-wide read coverages (in RPGC) for the DH10B+1-Mb-Syn61 genomic chimeric strain. Syn6l genomic segments shaded in pink, and homologous DH10B genomic segments shaded in dark-gray. Non-redundant sections of the E. coli genome shaded in light-gray; TS2 target site depicted by the blue triangle. Read fraction mapping to the Syn6l and homologous DH10B segments set above the coverage plot.

[0056] FIG. 10A-FIG. 10E display non-limiting exemplary data related to the efficiency and specificity of ACE relative to comparable genome-scale integration techniques and orientation preference for 100-kb Syn6l transfers into E. coli DH10B Δdif: lux. Shown in FIG. 10A is a transfer diagram of 100-kb, 1-Mb and 2-Mb fragments of Syn6l into E. coli DH10B. Insertion of the cargo DNA into the TS2 site is accomplished with programmable integration techniques such as ACE, λ-red recombination or an adapted REXER 2 (Cas9 excision in tandem with λ-red recombination). FIG. 10B shows ACE efficiency compared to λ-red recombination and REXER 2, measured by GFP+ colony forming units (c.f.u.) per experiment as a function of Syn61 transfer lengths up to 2-Mb. Data for ACE, λ-red recombination and REXER are shown from left to right for each size. FIG. 10C shows ACE specificity compared to λ-red recombination and REXER 2, calculated as the percentage of lux-/GFP+c.f.u. resulting from on-target integration into TS2 within the lux operon as a function of Syn61 transfer lengths up to 2-Mb. Data for ACE, λ-red recombination and REXER are shown from left to right for each size. Shown in FIG. 10D is a diagram of the E. coli Syn61 (red) and E. coli DH10B Δdif::lux (gray) genomes showing the positions of ter sites, dif site and origin of replication (oriC). Placements of the TEs are marked with yellow bars on the Syn61 genome corresponding to the 100-kb, 600-kb and 1-Mb Syn61 donor. Locations of the target sites 1-3 (TS1-3) in DH10B Δdif::lux are represented with purple, blue and pink bars. FIG. 10E shows an integration diagram of DH10B Δdif::lux genome with transfer of 100-kb Syn61 donor into either TS1, TS2 or TS3 via ACE. The transferred DNA is represented by the red ring segment flanked by yellow bars denoting the TEs labeled with either R or L to distinguish between RE and LE. Key sequences in the donor such as ter sites and the dif site are presented as red arrows and red bars, respectively. At each integration site (TS1-3), the two possible transposition orientations of the donor are depicted. (+) represents RL integration while (−) represents LR integration. At the TS1 and TS3 sites, one integration orientation and not the other would result in a chimeric genome that experiences collision (labeled Col. in the diagram) between replisome and the non-permissive side of a tus-bound ter site during chromosome synthesis, leading to termination of DNA replication (marked with a red X). The other orientation will lead to no collision (labeled N. Col.) as the replication fork will pass through the permissive end of the tus-ter complex (marked with a green checkmark). Adjacent to each integration is a corresponding genome-wide coverage map (in RPGC) for each E. coli DH10B+100-kb Syn61 genomic chimera strain. Syn61 genomic segments are shaded in pink, and homologous E. coli DH10B genomic segments are shaded in dark gray. Non-redundant sections of the E. coli genome are in lighter grays. Locations of the TS is given by the triangle on the X-axis, triangles pointing down indicate the target is the sense strand, while triangles pointing up indicate the target is the antisense strand. Read fraction mapping to the Syn61 segment and the homologous DH10B segment is set above the coverage plot. Read fractions share the same color coding as the coverage plot.

[0057] FIG. 11A-FIG. 11B display non-limiting exemplary schematics and data related to the architecture and stability of massively expanded E. coli synthetic genomes. FIG. 11A, as in FIG. 10 (e.g., FIGS. 10B, 10D), except integration diagrams of DH10B Δdif::lux genome with transfer of 600-kb Syn61 donor into either TS1, TS2 or TS3 via ACE. At the TS1 and TS3 sites, both orientations of integration would result in replication fork collision with the non-permissive side of tus-bound ter site (Col., marked with a red X). Labels of TS1 and TS3 genome-wide coverage plots are grayed out to show instability and loss of the transferred segment following transposition. At the TS2 site, both integration orientations would lead to chimeric genomes that do not experience replication fork collision with the non-permissive side of a ter-tus complex. The corresponding genome coverage plot indicates the stability of the transferred segment. Similar to FIG. 11A, FIG. 11B shows integration diagrams of DH10B Δdif::lux genome with transfer of 1-Mb Syn61 donor into either TS1, TS2 or TS3 via ACE.

[0058] FIG. 12A-FIG. 12D display non-limiting exemplary schematics and data related to the stability and fidelity of Syn-segment transfers throughout the E. coli genome. Shown in FIG. 12A are diagrams representing the transfer of 1-Mb seg. 2, 500-kb seg. 4 and 500-Kb seg. 5 Syn61 donors for insertion at TS1, TS2 and TS3 in recipient E. coli DH10B Δdif::lux strains leading to nine possible chimeric genomes. The size of each outcome genome is labeled in bold in the chimeric strain. Note that integration orientation of the cargo is not explicitly depicted in the final product; each chimeric genome can adopt either an RL or an LR configuration. FIG. 12B shows genome-wide read coverages (in RPGC) for the E. coli DH10B+1-Mb seg. 2 genomic chimeric strain integrated at TS2 and TS3. Syn61 genomic segments are shaded in pink, and homologous E. coli DH10B genomic segments are shaded in dark gray. Non-redundant sections of the E. coli genome are in lighter grays. Location of the TS2 and TS3 targets is given by the blue and pink triangles, respectively. Read fraction mapping to the Syn61 segment and the homologous DH10B segment is set above the coverage plot. Read fractions share the same color coding as the coverage plot. FIG. 12C shows genome-wide read coverages as in FIG. 12B, but genome-wide read coverage plot and read fraction mapping of 500-kb seg. 4 donor for insertion at TS1 (purple) and TS2 (blue) in recipient E. coli DH10B Δdif::lux strains. FIG. 12D shows genome wide read coverages in FIG. 12B, but genome-wide read coverage plot and read fraction mapping of 500-kb seg. 5 donor for insertion at TS1 (purple) and TS2 (blue) in recipient E. coli DH10B Δdif lux strains.

[0059] FIG. 13A-FIG. 13G display non-limiting exemplary schematics and data related to the construction, validation, and characterization of an organism with a trimeric genome in addition to extended stability of chimeric genomes. Shown in FIG. 13A is a schematic related to using PhiC31 recombinase to excise +2/2 selection and GFP markers from Cassette^{STOP} of a dif integrated E. coli DH10B+2-Mb Syn-seg. 1 genome chimera strain. The expression of PhiC31 in this strain triggers a crossing-over event between the attP and attB sequences flanking the selection and screening markers in Cassette^{STOP}, leading to marker loss, and enabling subsequent ACE events in this chimeric strain as shown in FIG. 5E. FIG. 13B displays a gel of results for assaying for Cassette^{STOP} marker excision via genotyping colony PCR of dif integrated E. coli DH10B+2-Mb seg. 1 cells before (+) and after (−) expression of PhiC31 recombinase. Chimeric cells before (+) and after (−) PhiC31 induction were also stamped onto selective LB agar containing either 200 μg/ml hygromycin (Hygro) or 2.5 mM 4-chlorophenylalanine (Cl-Phe). Shown in FIG. 13C are genotyping colony PCR gels for eight integrant colonies of the 1-Mb S. flexneri transfer into the dif integrated E. coli DH10B+2-Mb seg. 1. In the schematic above the gel, the blue rectangle represents the 1 Mb Shigella insert, the yellow boxes represent the LE and RE, and the red duplex DNA represents 2 Mb seg. 1 dif site. The integration site in dif targeted by crRNA^{TS(d(f)} is shown with a red triangle. The right and left junctions for a RL integration are checked with primers specific to dif and the Shigella segment, shown as blue and red arrows, respectively. D and R denote donor and recipient controls in each assay. Lengths of each PCR product are shown above each set of arrows in the schematic. Shown in FIG. 13D are genotyping colony PCR gels for eight integrant colonies of the 1-Mb S. flexneri transfer into the dif integrated E. coli DH10B+2-Mb Syn-seg. 1. In the schematic above the gel, the blue rectangle represents the 1 Mb Shigella insert, the yellow boxes represent the LE and RE, the red rectangles represent 2-Mb seg. 1 genomic stretches and the gray duplex DNA represents the DH10B dif site. The integration site in dif targeted by crRNA^{TS1(d(f)} is shown with a gray triangle. The right and left junctions for a RL integration of 2-Mb seg. 1 at the DH10B dif are checked with primers specific to dif and the Syn61 segment, shown as blue and red arrows, respectively. D and R denote donor and recipient controls in each assay. Lengths of each PCR product are shown above each set of arrows in the schematic. FIG. 13E displays a semi-log plot of growth curves (optical density as a function of hours elapsed) for chimeric and trimeric genome bacteria as well as their wild-type precursor strains. E. coli DH10B is given by the blue curve, S. flexneri is given by the orange curve, E. coli Syn61 is given by the green curve, DH10B+1-Mb Shigella is given by the red curve, DH10B+1-Mb Syn61 is given by the purple curve, DH10B+2-Mb Syn61 is given by the brown curve and DH10B+2-Mb Syn61+1-Mb Shigella is given by the pink curve. Reported curves are the average of four independently grown biological replicates of each strain, with the solid curve representing the mean OD at each time point and the colored halo surrounding each curve representing +/−s.d. Note that optical density is plotted on a logarithmic scale, hence the semi-log plot. FIG. 13F shows a graph of doubling times for chimeric and trimeric genome bacteria as well as their wild-type precursor strains. Reported doubling time, shown as mean+/−s.d., are the average of four independently grown biological replicates of each strain. The doubling time reported for each individual experiment is represented by dots. Shown in FIG. 13G are data related to the percentage of a panel of chimeric genomes stable (blue) and unstable (red) after prolonged growth exceeding 100 generations in select growth mediums (LB, TB and M9 media) and temperatures (30° C. or 37° C.). Stability is characterized by the retention of the external megabase-scale DNA at the end of extended growth as evidenced by genotyping colony PCR and genome read coverage from short-read sequencing.

[0060] FIG. 14A-FIG. 14J display non-limiting exemplary data related to extended transcriptomic characterization of E. coli Shigella and E. coli Vibrio genomic chimeras. Shown in FIG. 14A is hierarchical clustering of transcript counts, measured in log of transcripts per million+1 (log(TPM+1)), of S. flexneri gene homologs and E. coli gene homologs in the DH10B, MDS42 DH10B-Shigella, MDS42-Shigella and Shigella strains. Three individual replicates are shown for each strain. Genes are clustered based on expression level within each genomic background. FIG. 14B displays a graph of differential expression of redundant genes (dark blue) and non-redundant genes (light blue) between the chimeric strain and the E. coli background strain for both E. coli DH10B+1 Mb S. flexneri and E. coli MDS42+1 Mb S. flexneri. The log 2 of the ratio of the expression level of the redundant genes in the chimeric strain to the expression level of their homolog in the E. coli strain (dark blue) is plotted alongside log 2 of the ratio of the expression level of non-redundant genes in the chimeric strain to the expression level of its homolog in the E. coli strain (light blue). Points are also plotted based on their −log₁₀ adjusted p-value. P-value cutoff was set at 0.001 and the log 2 fold-change cutoff was set to 1 so that points below the cutoff are in gray. Shown in FIG. 14C is a Venn diagram of the redundant genes overexpressed in the E. coli DH10B+1-Mb S. flexneri chimera and the E. coli MDS42+1-Mb S. flexneri chimera and highlighting the set of redundant genes present and overexpressed in both chimeric strains. FIG. 14D displays results of analysis of the set of redundant genes overexpressed in both chimeric strains, grouped by GO (gene ontology) terms. Functional groupings are arranged by fold-enrichment of overexpression as well as the −log₁₀ false discovery rate (FDR). Shown in FIG. 14E is hierarchical clustering of transcript counts, measured in log of transcripts per million+1 (log(TPM+1)), of imported E. coli genes and V. natriegens genes in the MDS42, V. natriegens, Vibrio-MDS42 (Chr.1) chimera and Vibrio-MDS42 (Chr.2) chimera strains. Three individual replicates are shown for each strain. Genes are clustered based on expression level within each genomic background. FIG. 14F-FIG. 14G show graphs of differential expression of Vibrio genes (purple) between the chimeric strain and the V. natriegens background strain for both Vibrio+1 Mb MDS42 (Chr.1) and Vibrio+1 Mb MDS42 (Chr.2) chimeras. The log 2 of the ratio of the expression level of Vibrio genes in the chimeric strain to the expression level in the background strain is plotted. Points are also plotted based on their −log₁₀ adjusted p-value. P-value cutoff was set at 0.001 and the log 2 fold-change cutoff was set to 1 so that points below the cutoff are in gray. Shown in FIG. 14H is a Venn diagram of the V. natriegens upregulated and downregulated genes for both Vibrio+1 Mb MDS42 (Chr.1) and Vibrio+1 Mb MDS42 (Chr.2) chimeras highlighting the set of genes present and up- and down-regulated in both chimeric strains. FIG. 14I-FIG. 14J show results of analysis of the set of up- and down-regulated genes in both chimeric strains and in Vibrio+1 Mb MDS42 (Chr.1) chimera, grouped by GO (gene ontology) terms. Functional groupings are arranged by fold-enrichment of overexpression as well as the −log₁₀ false discovery rate (FDR).

[0061] FIG. 15A-FIG. E display non-limiting exemplary schematics and data related to genomic transfers from E. coli to Agrobacterium tumefaciens for functional agroinfiltration of large T-DNA and Pseudomonas putida. Shown in FIG. 15A is a diagram of 100-kb E. coli Syn61 transfer to A. tumefaciens. The Syn61 genome is depicted by the red circle and the A. tumefaciens genomes are depicted with chromosome 1 as a yellow circle and chromosome 2 as an orange segment. Sizes of transferred region, recipient genome and chimeric genome are given in the schematic. The transferred region in Syn61 is represented by the red portion of the circle flanked by TEs, shown as yellow rectangles. Transfer direction is shown by the arrow. The flaA, dif tetA and agpI genes of A. tumefaciens are indicated by green, red, orange and blue triangle rectangles, respectively. The outcome chimeric genome is represented as an integration of the red segment of the Syn61 genome into the A. tumefaciens genome at any of the four loci. Importantly, the 100-kb Syn61 contains a YFP T-DNA cargo. Shown in FIG. 15B is a schematic depicting Agroinfiltration of Nicotiana benthamiana leaves with chimeric Agrobacterium engineered with genomic YFP T-DNA. FIG. 15C displays exemplary confocal microscope images of YFP signal from agroinfiltrated Nicotiana leaf tissue of chimeric genome T-DNA expressing YFP alongside plasmid and genome YFP T-DNA controls. Images are captured with 20× magnification. Shown in FIG. 15D is a diagram of 100-kb Syn100 transfer to Pseudomonas putida. The E. coli Syn100 genome is depicted by the gray circle and the P. putida genome is depicted by the green circle. Sizes of transferred region, recipient genome and chimeric genome are given in the schematic. The transferred region Syn100 is represented by the red portion of the circle flanked by TEs, shown as yellow rectangles. Transfer direction is shown by the arrow. The glmS gene of P. putida is given by the orange rectangle, which is targeted by the CAST by the TS^{glmS} crRNA, shown as an orange triangle. The outcome chimeric genome is represented as an integration of the red Syn100 segment into the P. putida genome at glmS. FIG. 15E shows genome-wide read coverages (in RPGC) for the P. putida KT2440+100-kb Syn100 genomic chimeric strain. The Syn100 segment is shaded in red, and P. putida genome is shaded in light green. Location of the TS glmS target is given by the orange triangle.

[0062] FIG. 16A-FIG. 16H display non-limiting exemplary data related to extended P. protegens-E. coli chimera genome generation and metabolomic characterization. Shown in FIG. 16A is a diagram of 140-kb P. protegens pf-5 transfer into E. coli DH10B and corresponding genome-wide read coverages for the resultant chimeric genome. The P. protegens genome is depicted by the blue circle and the E. coli genomes are depicted with the gray circle. Genome integration sites TS2 and TS3 are indicated by their respective colored rectangle triangles. In the coverage plot, transferred DNA is highlighted in blue and integration sites indicated with colored triangles. Shown in FIG. 16B is a Venn diagram of distinct m/z peaks in E. coli DH10B, P. protegens pf-5 and 140-kb P. protegens-E. coli chimera highlighting the set of metabolites unique to and shared with between the three bacteria. FIG. 16C displays a 3D MS1 heatmap of 140-kb P. protegens TS2 and TS3 E. coli DH10B chimeras showing m/z vs. retention time vs. intensity landscape. FIG. 16D shows a graph of the distribution of unique m/z counts shared between experimental replicates of 140-kb P. protegens chimera. Shown in FIG. 16E is a Venn diagram of distinct m/z peaks in 415-kb P. protegens-E. coli TS2 and 140-kb P. protegens-E. coli TS2 chimera highlighting the set of metabolites unique to and shared with between the two chimeras. FIG. 16F displays results of principal component analysis of the 140-kb and 415-kb chimeras alongside E. coli DH10B and P. protegens pf-5. Shown in FIG. 16G is a schematic and data as in FIG. 16A, but diagrams and associated genome-wide read coverage plots for the 246-kb P. protegens pf-5 transfer to E. coli DH10B into genomic sites TS3 and TS5. FIG. 16H shows a schematic and data as in FIG. 16A, but diagrams and associated genome-wide read coverage plots for the 395-kb P. protegens pf-5 transfer of E. coli DH10B into genomic sites TS4, dif and TS3.

### DETAILED DESCRIPTION

[0063] In the following detailed description, reference is made to the accompanying drawings, which form a part hereof. In the drawings, similar symbols typically identify similar components, unless context dictates otherwise. The illustrative embodiments described in the detailed description, drawings, and claims are not meant to be limiting. Other embodiments may be utilized, and other changes may be made, without departing from the spirit or scope of the subject matter presented herein. It will be readily understood that the aspects of the present disclosure, as generally described herein, and illustrated in the Figures, can be arranged, substituted, combined, separated, and designed in a wide variety of different configurations, all of which are explicitly contemplated herein and made part of the disclosure herein.

[0064] All patents, published patent applications, other publications, and sequences from GenBank, and other databases referred to herein are incorporated by reference in their entirety with respect to the related technology.

[0065] Disclosed herein include systems for producing a chimeric or trimeric genome. In some embodiments, the system comprises: a) a donor cell comprising: (i) a first start cassette (Cassette^{START}) comprising, from 5′ to 3′, at least one cis-acting component of a first delivery module and a first integration sequence, and (ii) a first stop cassette (Cassette^{STOP}) comprising, from 5′ to 3′, a second integration sequence and at least one cis-acting component of the first delivery module, wherein the first Cassette^{START} is integrated at a first site in the genome of the donor cell and the first Cassette^{STOP} is integrated at a second site in the genome of the donor cell, wherein intervening sequence between the first Cassette^{START} and the first Cassette^{STOP} defines a first genomic transfer window; and (iii) one or more trans-acting components of the first delivery module or one or more first helper polynucleotides each comprising a sequence encoding a trans-acting component of the first delivery module, wherein the first delivery module comprises the one or more trans-acting components; and b) a recipient cell comprising one or more components of an integrator module or one or more second helper polynucleotides each comprising a sequence encoding a component of an integrator module, wherein the integrator module comprises the one or more components.

[0066] Disclosed herein include nucleic acid compositions for producing a chimeric or trimeric genome. In some embodiments, the nucleic acid composition comprises: i) a first and/or second start cassette (Cassette^{START}) each comprising, from 5′ to 3′: at least one cis-acting component of a first and/or second delivery module and a first integration sequence; ii) a first and/or second stop cassette (Cassette^{STOP}) each comprising, from 5′ to 3′: a second integration sequence and at least one cis-acting component of the first and/or second delivery module; iii) one or more first helper polynucleotides each comprising a sequence encoding a trans-acting component of the first and/or second delivery module, wherein the first and/or second delivery module comprise one or more trans-acting components; and optionally iv) one or more second helper polynucleotides each comprising a sequence encoding a component of an integrator module, wherein the integrator module comprises one or more components.

[0067] Provided herein are kits comprising any of the systems or nucleic acid compositions of the disclosure, and set of instructions for use.

[0068] Disclosed herein are methods for producing a chimeric genome. In some embodiments, the method comprises: contacting a recipient cell disclosed herein with a donor cell disclosed herein, and: expressing the one or more trans-acting components of the first delivery module in the donor cell, thereby the sequence defined by the genomic transfer window is transferred from the donor cell to the recipient cell and thereby the first donor genomic segment comprising the first donor sequence flanked by the first integration sequence and the second integration sequence of the first Cassette^{START} and the first Cassette^{STOP} is generated in the recipient cell; and expressing the one or more components of the integrator module in the recipient cell, thereby the first donor genomic segment is inserted into the first double-stranded target sequence in the genome of the recipient cell, thereby generating the chimeric genome in the recipient cell.

### Definitions

[0069] Unless defined otherwise, technical and scientific terms used herein have the same meaning as commonly understood by one of ordinary skill in the art to which the present disclosure belongs. See, e.g. Singleton et al., Dictionary of Microbiology and Molecular Biology 2nd ed., J. Wiley & Sons (New York, NY 1994); Sambrook et al., Molecular Cloning, A Laboratory Manual, Cold Spring Harbor Press (Cold Spring Harbor, NY 1989). For purposes of the present disclosure, the following terms are defined below.

[0070] As used herein, the term “about” means plus or minus 5% of the provided value.

[0071] As used herein, the term “double-stranded target DNA” refers to a DNA that includes a “target site” or “target sequence.” The term “target sequence” is used herein to refer to a nucleic acid sequence present in a double-stranded target DNA to which a DNA-targeting sequence or segment (also referred to herein as a “spacer”) of a crRNA can hybridize, provided sufficient conditions for hybridization exist. For example, the target sequence 5′-GAGCATATC-3′ within a target DNA is targeted by (or is capable of hybridizing with, or is complementary to) the RNA sequence 5′-GAUAUGCUC-3′. Hybridization between the DNA-targeting sequence or segment of a crRNA and the target sequence can, for example, be based on Watson-Crick base pairing rules, which enables programmability in the DNA-targeting sequence or segment. The DNA-targeting sequence or segment of a crRNA can be designed, for instance, to hybridize with any target sequence.

[0072] The terms “polynucleotide” and “nucleic acid” are used interchangeably herein and refer to a polymeric form of nucleotides of any length, either ribonucleotides or deoxyribonucleotides. A polynucleotide can be single-, double-, or multi-stranded DNA or RNA, genomic DNA, cDNA, DNA-RNA hybrids/triple helices, or a polymer including purine and pyrimidine bases or other natural, chemically or biochemically modified, non-natural, or derivatized nucleotide bases. In some embodiments, a polynucleotide comprises a nucleotide sequence encoding a gene product operably linked to one or more expression control elements (e.g., a promoter), as an expression cassette. Any of the RNA sequences disclosed herein may also be DNA (either single-stranded or double-stranded), e.g., wherein “U” is converted to “T.” Any of the DNA sequences disclosed herein may also be RNA, e.g., wherein “T” is converted to “U.”

[0073] As used herein, the term “binding” refers to a non-covalent interaction between macromolecules (e.g., between a protein and a nucleic acid). While in a state of non-covalent interaction, the macromolecules are said to be “associated” or “interacting” or “binding” (e g., when a molecule X is said to interact with a molecule Y, it means that the molecule X binds to molecule Y in a non-covalent manner). Binding interactions can be characterized by a dissociation constant (Kd), for example a Kd of, or a Kd less than, 10⁻⁶ M, 10⁻⁷ M, 10⁻⁸M, 10⁻⁹ M, 10⁻⁰ M, 10⁻¹¹ M, 10⁻¹² M, 10⁻¹³ M, 10⁻¹⁴ M, 10⁻¹⁵ M, or a number or a range between any two of these values. Kd can be dependent on environmental conditions, e.g., pH and temperature. “Affinity” refers to the strength of binding, and increased binding affinity is correlated with a lower Kd.

[0074] The terms “complementarity” and “complementary” mean that a nucleic acid can form hydrogen bond(s) with another nucleic acid based on traditional Watson-Crick base paring rule, that is, adenine (A) pairs with thymine (U) and guanine (G) pairs with cytosine (C). Complementarity can be perfect (e.g. complete complementarity) or imperfect (e.g. partial complementarity). Perfect or complete complementarity indicates that each and every nucleic acid base of one strand is capable of forming hydrogen bonds according to Watson-Crick canonical base pairing with a corresponding base in another, antiparallel nucleic acid sequence. Partial complementarity indicates that only a percentage of the contiguous residues of a nucleic acid sequence can form Watson-Crick base pairing with the same number of contiguous residues in another, antiparallel nucleic acid sequence. In some embodiments, the complementarity can be at least 70%, 80%, 90%, 100% or a number or a range between any two of these values. In some embodiments, the complementarity is perfect, i.e. 100%. For example, the complementary candidate sequence segment is perfectly complementary to the candidate sequence segment, whose sequence can be deducted from the candidate sequence segment using the Watson-Crick base pairing rules.

[0075] The term “vector” as used herein, can refer to a vehicle for carrying or transferring a nucleic acid. Non-limiting examples of vectors include plasmids, bacteria, and viruses (for example, Agrobacterium tumefaciens Ti vectors).

[0076] The term “construct,” as used herein, can refer to a recombinant nucleic acid that has been generated for the purpose of the expression of a specific nucleotide sequence(s), or that is to be used in the construction of other recombinant nucleotide sequences. As used herein, the term “plasmid” can refer to a nucleic acid that can be used to replicate recombinant DNA sequences within a host organism. The sequence can be a double stranded DNA.

[0077] As used herein, the term “promoter” is a nucleotide sequence that permits binding of RNA polymerase and directs the transcription of a gene. Typically, a promoter is located in the 5′ non-coding region of a gene, proximal to the transcriptional start site of the gene. Sequence elements within promoters that function in the initiation of transcription are often characterized by consensus nucleotide sequences. Examples of promoters include, but are not limited to, promoters from bacteria, yeast, plants, viruses, and mammals (including humans). A promoter can be inducible, repressible, and/or constitutive. Inducible promoters initiate increased levels of transcription from DNA under their control in response to some change in culture conditions, such as a change in temperature.

[0078] As used herein, the term “operably linked” is used to describe the connection between regulatory elements and a gene or its coding region. Typically, gene expression is placed under the control of one or more regulatory elements, for example, without limitation, constitutive or inducible promoters, tissue-specific regulatory elements, and enhancers. A gene or coding region is said to be “operably linked to” or “operatively linked to” or “operably associated with” the regulatory elements, meaning that the gene or coding region is controlled or influenced by the regulatory element. For instance, a promoter is operably linked to a coding sequence if the promoter effects transcription or expression of the coding sequence.

[0079] As used herein, “sequence identity” or “identity” in the context of two nucleic acid or polypeptide sequences makes reference to the nucleotide bases or amino acid residues in the two sequences that are the same when aligned for maximum correspondence over a specified comparison window. When percentage of sequence identity or similarity is used in reference to proteins, it is recognized that residue positions which are not identical often differ by conservative amino acid substitutions, where amino acid residues are substituted with a functionally equivalent residue of the amino acid residues with similar physiochemical properties and therefore do not change the functional properties of the molecule.

[0080] As used herein in the term “derived from”, in the context of an amino acid sequence or polynucleotide sequence (e.g., an amino acid sequence “derived from” a conjugation system or a transposase system), is meant to indicate that the polypeptide or nucleic acid has a sequence that is based on that of a reference polypeptide or nucleic acid, and is not meant to be limiting as to the source or method in which the protein or nucleic acid is made. By way of example, the term “derived from” includes homologs or variants of reference amino acid or DNA sequences.

[0081] As used herein, the term “derived from” can also refer to a specified nucleotide sequence that may be obtained from a particular specified source or species, albeit not necessarily directly from that specified source or species.

[0082] Standard techniques can be used for recombinant DNA, oligonucleotide synthesis, and cell culture and transformation (e.g., electroporation, lipofection). Enzymatic reactions and purification techniques can be performed according to manufacturer's specifications or as commonly accomplished in the art or as described herein. The foregoing techniques and procedures can be generally performed according to conventional methods well known in the art and as described in various general and more specific references that are cited and discussed throughout the present specification. See, e.g., Sambrook et al., Molecular Cloning: A Laboratory Manual (2d ed., Cold Spring Harbor Laboratory Press, Cold Spring Harbor, N.Y. (1989)), which is incorporated herein by reference for any purpose. Unless specific definitions are provided, the nomenclatures utilized in connection with, and the laboratory procedures and techniques of, analytical chemistry, synthetic organic chemistry, and medicinal and pharmaceutical chemistry described herein are those commonly known and used in the art. Standard techniques can be used for chemical syntheses, chemical analyses, pharmaceutical preparation, formulation, and delivery, and treatment of patients.

[0083] There are provided, in some embodiments, synthetic chimeric organisms and novel methods for their generation. The methods disclosed herein can enable the precise insertion of genetic material from multiple organisms into a recipient organism, resulting in the generation of entirely new life forms with unique properties. As demonstrated in Example 1, these synthetic lifeforms were shown to express the inserted genetic material, manifesting genotype to phenotype and thereby enabling functional applications. Provided herein include compositions, methods, systems, and kits for the designation and modular construction of “donor” and “recipient” organisms, as well as applications and methods of using.

[0084] Currently available approaches in the field of synthetic genomes have been limited to recoding, rearranging (refactoring) and minimizing existing genomes. The methods used for these purposes are not suitable for creating synthetic chimeric genomes requiring large DNA integrations. Efforts to expand the size of bacteria genomes with one-step insertions of multiple megabases of DNA have not been reported previously. Existing efforts to expand the gene content of a bacteria organism have been relegated to low-throughput, inflexible large insertions on specially prepared bacteria episomes, or through many small, fragmented insertions scattered throughout the bacterial genome. In both cases, the methods used to attain these outcomes are not able to perform genome-scale insertions directly on a native bacterial chromosome.

[0085] The methods and compositions provided herein can overcome the limitations of prior methods by providing highly efficient and versatile processes for creating synthetic, chimeric organisms. The method can comprise the use of novel artificial conjugative elements, comprising naturally occurring or engineered CRISPR-associated transposases (CASTs) and/or site-specific DNA recombinase/integrases as an integrator module, coupled to synthetic microbial DNA transfer systems as the delivery module. As shown in Example 1, the disclosed compositions and methods can universally transfer and stably integrate DNA into genomes or episomes at the whole-genome level, with demonstrations performed beyond 2-Mb (at least half of the genome of a typical bacterial organism) using several distinct donor species combinatorially across several distinct recipient species. Using methods and compositions provided herein, the entirety of a microbial genome was shown to be modularized and ported over to designated recipient strains, across distinct genomic loci in a programmable manner. Also provided herein include methods and novel genetic components enabling the transfer, selection, and rapid screening of imported genetic material, such as the use of selection markers and optimized fluorescence expression systems. Altogether, the disclosed methods and compositions provided allow for stable and robust expression of newly-gained foreign genes alongside previously present native genes, enabling the first-in-class streamlined creation of organisms with desirable phenotypic traits.

[0086] In some embodiments, alternatives to using Type I-F Tn6677 CAST and RP4-family conjugation described herein include using either other CRISPR-associated transposons (such as other Type I-F, Type I-B, Type I-D or Type V-K CASTs, among others) or site-specific DNA recombinases and integrases (e.g., attP-attB recombination with Bxb1, PhiC31 or Cre-lox recombinases) as the integrator module and other conjugative plasmids (e.g., incompatibility (Inc) P, F, N family plasmids and Tumor inducing (Ti) plasmids) as the delivery module.

[0087] As described herein, designation and modular construction of “donor” and “recipient” organisms can also be accomplished with multiple systems. In some embodiments, the “donor” organism is constructed using λ red mediated homologous recombination. In other embodiments, “donor” organisms can be constructed using CAST systems (such as related but mutually non-interacting Type I-F systems). “Recipient” organisms and their target sites can be established by the use of Prime editing or conventional recombination proteins (e.g. Lambda-Red, recT systems) to write in attP and attB sequences on their genomes when site-specific recombinases and integrases are employed as the integrator module.

[0088] Chimeric genome bacteria synthesized with the methods and compositions provided herein can enable applications where these large insertions confer novel functional phenotypes to the engineered organisms. In some embodiments, and without being bound by any particular theory, these chimeric DNA are sourced for genomic islands (GI) and the microbial mobilome, and transferring megabase sized segments of diverse bacterial genomes with different environmental niches can create organisms suited for growth in harsh environments, production of economically valuable secondary metabolites and biomolecules and as a means to study genome fragments from a variety of sources for biological discovery and innovation.

[0089] The methods and compositions disclosed herein can revolutionize and drive actionable field applications in a number of areas, including, for example, one or more of the following: (i) Agriculture (e.g., genetically modified agro-biologicals for the treatment, protection, and enhancement of crop yield, tolerance to pests, diseases, and weather conditions; (ii) Biological nitrogen fixation (e.g., synthetic chimeric bacteria can be applied to associate with agriculturally relevant crops for nitrogen fixation); (iii) Pharmaceuticals (e.g., new antibiotics, cancer treatments, or vaccines, as well as Novel and genetically controlled delivery vehicles for DNA, RNA, and/or protein); (iv) Industrial biotechnology (e.g., synthetic chimeric bacteria can be used to produce enzymes, drugs, and other valuable products currently inaccessible via natural, wild bacteria); (v) Biofuels (e.g., production of fuel from renewable sources); (vi) Bioremediation (e.g., cleaning up polluted soil and water, and synthetic chimeric bacteria can be created to be resistant to heavy metals, chemicals and other extreme stressors of temperature, pressure and radiation); (vii) Biocontainment (e.g., genetically controlled containment of microbial agents and technologies); (viii) Bioplastics (e.g., development of environmentally friendly plastics); and (ix) DNA Storage/Cryptography (e.g., stable encryption and decryption of genetically encoded computational information into microbial genomes).

[0090] Disclosed herein include systems, compositions, and kits for producing a chimeric, a trimeric genome, and/or an n-meric genome. An organism's physiology is heavily influenced by its genomic content. Building genomic chimeras can enable melding of the diverse functions and properties of life. However, prior arts in genome synthesis are limited to reconstituting pre-existing functions within a singular genome rather than combining and extending diverse genomic functions across multiple distinct genomes. Existing methods are also prohibitively expensive, labor intensive, and time consuming, and thus fundamentally not scalable for creating large synthetic chimeric genomes. To address all these limitations, there is disclosed and described herein Additive Conjugative-CAST Engineering (ACE) combining conjugation with CRISPR-associated transposition (CAST) to deliver and integrate up to half a genome per step from a donor cell into a precisely defined position in the recipient's genome. Demonstrated herein is ACE's capability to integrate at least a 2-megabase donor genomic segment in a single step and at least 3 megabase in two consecutive steps. Importantly, ACE, when coupled to Orthogonal CAST sequential integration system (OASIS), allows for the generalizable creation of multiple genomic chimeras across species, genus, order and class barriers. It is further demonstrated herein that such chimeric organisms, also referred to herein as genome expanded organisms (GEOs), can be stably forged from at least three starting bacterial strains, can be stably maintained to express all their acquired genomic parts in a single chimera, and can demonstrate emergent metabolic signatures as evidenced by multi-omics exploration. ACE offers a new paradigm of creating artificial lifeforms to combine desired properties, generate novel functions and offers a unique perspective to probe unexplored plasticity in genome architecture and expression patterns of novel, massively expanded genomes.

[0091] Disclosed herein include systems for producing a chimeric or trimeric genome. In some embodiments, the system comprises: a) a donor cell comprising: (i) a first start cassette (Cassette^{START}) comprising, from 5′ to 3′, at least one cis-acting component of a first delivery module and a first integration sequence, and (ii) a first stop cassette (Cassette^{STOP}) comprising, from 5′ to 3′, a second integration sequence and at least one cis-acting component of the first delivery module, wherein the first Cassette^{START} is integrated at a first site in the genome of the donor cell and the first Cassette^{STOP} is integrated at a second site in the genome of the donor cell, wherein intervening sequence between the first Cassette^{START} and the first Cassette^{STOP} defines a first genomic transfer window; and (iii) one or more trans-acting components of the first delivery module or one or more first helper polynucleotides each comprising a sequence encoding a trans-acting component of the first delivery module, wherein the first delivery module comprises the one or more trans-acting components; and b) a recipient cell comprising one or more components of an integrator module or one or more second helper polynucleotides each comprising a sequence encoding a component of an integrator module, wherein the integrator module comprises the one or more components.

[0092] In some embodiments: (1) a sequence defined by the first genomic transfer window is capable of being transferred from the donor cell to the recipient cell upon expression of the one or more trans-acting components of the first delivery module in the donor cell, thereby generating a first donor genomic segment in the recipient cell flanked by the first integration sequence and the second integration sequence of the first Cassette^{START} and the first Cassette^{STOP}. and (2) the first donor genomic segment is capable of being inserted into a first double-stranded target sequence in the genome of the recipient cell upon expression of the one or more components of the integrator module, thereby generating a chimeric genome in the recipient cell.

[0093] The system can comprise: c) a second donor cell comprising: (i) a second start cassette (Cassette^{START}) comprising, from 5′ to 3′, at least one cis-acting component of a second delivery module and a first integration sequence, and (ii) a second stop cassette (Cassette^{STOP}) comprising, from 5′ to 3′, a second integration sequence and at least one cis-acting component of the second delivery module, wherein the second Cassette^{START} is integrated at a first site in the genome of the second donor cell and the second Cassette^{STOP} is integrated at a second site in the genome of the second donor cell, thereby defining a second genomic transfer window; and (iii) one or more trans-acting components of the second delivery module or one or more first helper polynucleotides each comprising a sequence encoding a trans-acting component of the second delivery module, wherein the second delivery module comprises the one or more trans-acting components.

[0094] In some embodiments: (3) a sequence defined by the second genomic transfer window is capable of being transferred from the second donor cell to the recipient cell comprising the chimeric genome upon expression of the one or more trans-acting components of the second delivery module in the second donor cell, thereby generating a second donor genomic segment flanked by the first integration sequence and the second integration sequence of the second Cassette^{START} and the second Cassette^{STOP} in the recipient cell comprising the chimeric genome; and (4) the second donor genomic segment is capable of being inserted into a second double-stranded target sequence in the genome of the recipient cell comprising the chimeric genome upon expression of the one or more components of the integrator module, thereby generating a trimeric genome in the recipient cell comprising the chimeric genome. The second double-stranded target sequence can be comprised within the first donor genomic segment.

[0095] Disclosed herein include nucleic acid compositions for producing a chimeric or trimeric genome. In some embodiments, the nucleic acid composition comprises: i) a first and/or second start cassette (Cassette^{START}) each comprising, from 5′ to 3′: at least one cis-acting component of a first and/or second delivery module and a first integration sequence; ii) a first and/or second stop cassette (Cassette^{STOP}) each comprising, from 5′ to 3′: a second integration sequence and at least one cis-acting component of the first and/or second delivery module; iii) one or more first helper polynucleotides each comprising a sequence encoding a trans-acting component of the first and/or second delivery module, wherein the first and/or second delivery module comprise one or more trans-acting components; and optionally iv) one or more second helper polynucleotides each comprising a sequence encoding a component of an integrator module, wherein the integrator module comprises one or more components.

[0096] The length of a genomic transfer window (e.g., a first and/or second genomic transfer window) can vary. The first and/or second genomic transfer window can be about 10 kb to at least 2 MB in length. In some embodiments, a genomic transfer window (e.g., first and/or second genomic transfer window) can be less than 10 kb or more than 2 MB (e.g., 2000 kb) in length. In some embodiments, the first and/or second genomic transfer window can be, can be at least, or can be at least about, 10 kb, 20 kb, 30 kb, 40 kb, 50 kb, 60 kb, 70 kb, 80 kb, 90 kb, 100 kb, 110 kb, 120 kb, 130 kb, 140 kb, 150 kb, 160 kb, 170 kb, 180 kb, 190 kb, 200 kb, 210 kb, 220 kb, 230 kb, 240 kb, 250 kb, 260 kb, 270 kb, 280 kb, 290 kb, 300 kb, 310 kb, 320 kb, 330 kb, 340 kb, 350 kb, 360 kb, 370 kb, 380 kb, 390 kb, 400 kb, 410 kb, 420 kb, 430 kb, 440 kb, 450 kb, 460 kb, 470 kb, 480 kb, 490 kb, 500 kb, 510 kb, 520 kb, 530 kb, 540 kb, 550 kb, 560 kb, 570 kb, 580 kb, 590 kb, 600 kb, 610 kb, 620 kb, 630 kb, 640 kb, 650 kb, 660 kb, 670 kb, 680 kb, 690 kb, 700 kb, 710 kb, 720 kb, 730 kb, 740 kb, 750 kb, 760 kb, 770 kb, 780 kb, 790 kb, 800 kb, 810 kb, 820 kb, 830 kb, 840 kb, 850 kb, 860 kb, 870 kb, 880 kb, 890 kb, 900 kb, 910 kb, 920 kb, 930 kb, 940 kb, 950 kb, 960 kb, 970 kb, 980 kb, 990 kb, 1000 kb, 1010 kb, 1020 kb, 1030 kb, 1040 kb, 1050 kb, 1060 kb, 1070 kb, 1080 kb, 1090 kb, 1100 kb, 1110 kb, 1120 kb, 1130 kb, 1140 kb, 1150 kb, 1160 kb, 1170 kb, 1180 kb, 1190 kb, 1200 kb, 1210 kb, 1220 kb, 1230 kb, 1240 kb, 1250 kb, 1260 kb, 1270 kb, 1280 kb, 1290 kb, 1300 kb, 1310 kb, 1320 kb, 1330 kb, 1340 kb, 1350 kb, 1360 kb, 1370 kb, 1380 kb, 1390 kb, 1400 kb, 1410 kb, 1420 kb, 1430 kb, 1440 kb, 1450 kb, 1460 kb, 1470 kb, 1480 kb, 1490 kb, 1500 kb, 1510 kb, 1520 kb, 1530 kb, 1540 kb, 1550 kb, 1560 kb, 1570 kb, 1580 kb, 1590 kb, 1600 kb, 1610 kb, 1620 kb, 1630 kb, 1640 kb, 1650 kb, 1660 kb, 1670 kb, 1680 kb, 1690 kb, 1700 kb, 1710 kb, 1720 kb, 1730 kb, 1740 kb, 1750 kb, 1760 kb, 1770 kb, 1780 kb, 1790 kb, 1800 kb, 1810 kb, 1820 kb, 1830 kb, 1840 kb, 1850 kb, 1860 kb, 1870 kb, 1880 kb, 1890 kb, 1900 kb, 1910 kb, 1920 kb, 1930 kb, 1940 kb, 1950 kb, 1960 kb, 1970 kb, 1980 kb, 1990 kb, 2000 kb, in length, or a number or range between any two of these values.

[0097] The length of a donor genomic segment (e.g., first and/or second donor genomic segment) can vary. The first and/or second donor genomic segment can be about 10 kb to at least 2 MB in length. The donor genomic segment, e.g., the first and/or second donor genomic segment can be less than 10 kb or more than 2 MB in length. The donor segment, e.g., the first and/or second donor genomic segment, can be, can be at least, or can be at least about 10 kb, 20 kb, 30 kb, 40 kb, 50 kb, 60 kb, 70 kb, 80 kb, 90 kb, 100 kb, 110 kb, 120 kb, 130 kb, 140 kb, 150 kb, 160 kb, 170 kb, 180 kb, 190 kb, 200 kb, 210 kb, 220 kb, 230 kb, 240 kb, 250 kb, 260 kb, 270 kb, 280 kb, 290 kb, 300 kb, 310 kb, 320 kb, 330 kb, 340 kb, 350 kb, 360 kb, 370 kb, 380 kb, 390 kb, 400 kb, 410 kb, 420 kb, 430 kb, 440 kb, 450 kb, 460 kb, 470 kb, 480 kb, 490 kb, 500 kb, 510 kb, 520 kb, 530 kb, 540 kb, 550 kb, 560 kb, 570 kb, 580 kb, 590 kb, 600 kb, 610 kb, 620 kb, 630 kb, 640 kb, 650 kb, 660 kb, 670 kb, 680 kb, 690 kb, 700 kb, 710 kb, 720 kb, 730 kb, 740 kb, 750 kb, 760 kb, 770 kb, 780 kb, 790 kb, 800 kb, 810 kb, 820 kb, 830 kb, 840 kb, 850 kb, 860 kb, 870 kb, 880 kb, 890 kb, 900 kb, 910 kb, 920 kb, 930 kb, 940 kb, 950 kb, 960 kb, 970 kb, 980 kb, 990 kb, 1000 kb, 1010 kb, 1020 kb, 1030 kb, 1040 kb, 1050 kb, 1060 kb, 1070 kb, 1080 kb, 1090 kb, 1100 kb, 1110 kb, 1120 kb, 1130 kb, 1140 kb, 1150 kb, 1160 kb, 1170 kb, 1180 kb, 1190 kb, 1200 kb, 1210 kb, 1220 kb, 1230 kb, 1240 kb, 1250 kb, 1260 kb, 1270 kb, 1280 kb, 1290 kb, 1300 kb, 1310 kb, 1320 kb, 1330 kb, 1340 kb, 1350 kb, 1360 kb, 1370 kb, 1380 kb, 1390 kb, 1400 kb, 1410 kb, 1420 kb, 1430 kb, 1440 kb, 1450 kb, 1460 kb, 1470 kb, 1480 kb, 1490 kb, 1500 kb, 1510 kb, 1520 kb, 1530 kb, 1540 kb, 1550 kb, 1560 kb, 1570 kb, 1580 kb, 1590 kb, 1600 kb, 1610 kb, 1620 kb, 1630 kb, 1640 kb, 1650 kb, 1660 kb, 1670 kb, 1680 kb, 1690 kb, 1700 kb, 1710 kb, 1720 kb, 1730 kb, 1740 kb, 1750 kb, 1760 kb, 1770 kb, 1780 kb, 1790 kb, 1800 kb, 1810 kb, 1820 kb, 1830 kb, 1840 kb, 1850 kb, 1860 kb, 1870 kb, 1880 kb, 1890 kb, 1900 kb, 1910 kb, 1920 kb, 1930 kb, 1940 kb, 1950 kb, 1960 kb, 1970 kb, 1980 kb, 1990 kb, 2000 kb, in length, or a number or range between any two of these values.

[0098] In some embodiments, any transcription termination sequence (ter) comprised within the first and/or second donor genomic segment is in the same orientation as any ter in or near: the first double-stranded target sequence in the genome of the recipient cell; and/or the second double-stranded target sequence in the genome of the recipient cell comprising the chimeric genome.

[0099] The length of a chimeric genome, trimeric genome, or n-meric genome can vary. A chimeric genome, trimeric genome, or n-meric genome can be at least about 4 MB in length. A chimeric genome, trimeric genome, or n-meric genome can be at least about 4 MB, 4.5 MB, 5 MB, 6 MB, 6.5 MB, 7 MB, 7.5 MB, 8 MB, 8.5 MB, 9 MB, 9.5 MB, or 10 MB in length. A chimeric genome, trimeric genome, or n-meric genome can be, can be at least, or can be at least about 4.0 MB, 4.1 MB, 4.2 MB, 4.3 MB, 4.4 MB, 4.5 MB, 4.6 MB, 4.7 MB, 4.8 MB, 4.9 MB, 5.0 MB, 5.1 MB, 5.2 MB, 5.3 MB, 5.4 MB, 5.5 MB, 5.6 MB, 5.7 MB, 5.8 MB, 5.9 MB, 6.0 MB, 6.1 MB, 6.2 MB, 6.3 MB, 6.4 MB, 6.5 MB, 6.6 MB, 6.7 MB, 6.8 MB, 6.9 MB, 7.0 MB, 7.1 MB, 7.2 MB, 7.3 MB, 7.4 MB, 7.5 MB, 7.6 MB, 7.7 MB, 7.8 MB, 7.9 MB, 8.0 MB, 8.1 MB, 8.2 MB, 8.3 MB, 8.4 MB, 8.5 MB, 8.6 MB, 8.7 MB, 8.8 MB, 8.9 MB, 9.0 MB, 9.1 MB, 9.2 MB, 9.3 MB, 9.4 MB, 9.5 MB, 9.6 MB, 9.7 MB, 9.8 MB, 9.9 MB, 10.0 MB, or longer, in length, or a number or range between any two of these values. A chimeric genome, trimeric genome, or n-meric genome at least about 3 MB (e.g., megabases) in length. A chimeric genome, trimeric genome, or n-meric genome can be, can be at least, or can be at least about 3.0 MB, 3.1 MB, 3.2 MB, 3.3 MB, 3.4 MB, 3.5 MB, 3.6 MB, 3.7 MB, 3.8 MB, 3.9 MB, 4.0 MB, 4.1 MB, 4.2 MB, 4.3 MB, 4.4 MB, 4.5 MB, 4.6 MB, 4.7 MB, 4.8 MB, 4.9 MB, 5.0 MB, 5.1 MB, 5.2 MB, 5.3 MB, 5.4 MB, 5.5 MB, 5.6 MB, 5.7 MB, 5.8 MB, 5.9 MB, 6.0 MB, 6.1 MB, 6.2 MB, 6.3 MB, 6.4 MB, 6.5 MB, 6.6 MB, 6.7 MB, 6.8 MB, 6.9 MB, 7.0 MB, 7.1 MB, 7.2 MB, 7.3 MB, 7.4 MB, 7.5 MB, 7.6 MB, 7.7 MB, 7.8 MB, 7.9 MB, 8.0 MB, 8.1 MB, 8.2 MB, 8.3 MB, 8.4 MB, 8.5 MB, 8.6 MB, 8.7 MB, 8.8 MB, 8.9 MB, 9.0 MB, 9.1 MB, 9.2 MB, 9.3 MB, 9.4 MB, 9.5 MB, 9.6 MB, 9.7 MB, 9.8 MB, 9.9 MB, 10.0 MB, or longer, in length, or a number or range between any two of these values.

[0100] The cell type (e.g., organism) of a donor sell, a second donor cell, and/or a recipient cell can vary. The donor cell, the second donor cell, the recipient cell, or any combination thereof can be a eukaryotic cell. The eukaryotic cell can be a fungal cell. The eukaryotic cell can be a plant cell. The donor cell, the second donor cell, the recipient cell, or any combination thereof can be a prokaryotic cell.

[0101] In some embodiments, the prokaryotic cell is or is derived from a bacterial species selected from the group comprising: Acinetobacter species, Actinobacillus species, Actinomycetes species, an Actinomyces species, Aerococcus species an Aeromonas species, an Anaplasma species, an Alcaligenes species, a Bacillus species, a Bacteroides species, a Bartonella species, a Bifidobacterium species, a Bordetella species, a Borrelia species, a Brucella species, a Burkholderia species, a Campylobacter species, a Capnocytophaga species, a Chlamydia species, a Citrobacter species, a Coxiella species, a Corynebacterium species, a Clostridium species, an Eikenella species, an Enterobacter species, an Escherichia species, an Enterococcus species, an Ehrlichia species, an Epidermophyton species, an Erysipelothrix species, a Eubacterium species, a Francisella species, a Fusobacterium species, a Gardnerella species, a Gemella species, a Haemophilus species, a Helicobacter species, a Kingella species, a Klebsiella species, a Lactobacillus species, a Lactococcus species, a Listeria species, a Leptospira species, a Legionella species, a Leptospira species, Leuconostoc species, a Mannheimia species, a Microsporum species, a Micrococcus species, a Moraxella species, a Morganella species, a Mobiluncus species, a Micrococcus species, Mycobacterium species, a Mycoplasma species, a Nocardia species, a Neisseria species, a Pasteurella species, a Pediococcus species, a Peptostreptococcus species, a Pityrosporum species, a Plesiomonas species, a Prevotella species, a Porphyromonas species, a Proteus species, a Providencia species, a Pseudomonas species, a Propionibacterium species, a Rhodococcus species, a Rickettsia species, a Rhodococcus species, a Serratia species, a Stenotrophomonas species, a Salmonella species, a Serratia species, a Shigella species, a Staphylococcus species, a Streptococcus species, a Spirillum species, a Streptobacillus species, a Treponema species, a Tropheryma species, a Trichophyton species, an Ureaplasma species, a Veillonella species, a Vibrio species, a Yersinia species, or a Xanthomonas species. In some embodiments, the prokaryotic cell is or is derived from an archaeal species.

[0102] In some embodiments, the genera and/or species of the donor cell and/or the second donor cell and the genera and/or the species of the recipient cell are the same or different. For example, any two of the donor cell, the second donor cell, and the recipient cell can be from the same species and/or the same genus. In some embodiments, any two of the donor cell, the second donor cell, and the recipient cell are from a different genus and/or species.

### Delivery Module

[0103] Provided herein are delivery modules. A delivery module can comprise one or more components encoded by or derived from a bacterial conjugation system.

[0104] Conjugation was first discovered in 1946 by Edward Tatum and Joshua Lederberg, who showed that bacteria could exchange genetic information through the unidirectional transfer of DNA, mediated by a so-called F (Fertility) factor. It was later realized that the F factor is a replicative extra-chromosomal genetic element, e.g., plasmid, which can be transferred across the cell membranes of the parental strains. Since this seminal discovery, the identification of a plethora of conjugative elements, including plasmids, conjugative transposons, and integrative conjugative elements (ICEs), has revealed that conjugation is a universally conserved DNA transfer mechanism among Gram-negative and Gram-positive bacteria.

[0105] Conjugative plasmids generally carry all the genes required for their maintenance during the vertical transfer from the mother to the daughter cells, as well as the genes necessary for horizontal transfer during conjugation from the donor to the recipient cell. These functions are encoded by different regions of the plasmid. Isolation and sequence analysis of an increasing number of conjugative plasmids has revealed considerable diversity in terms of genetic properties and organization. This diversity also indicates that different plasmids might use various regulations, molecular reactions, and strategies to achieve productive conjugational transfer and maintenance.

[0106] Described below is the life cycle of the F plasmid during conjugational transfer from the donor to the recipient cell, as an exemplar of conjugation. The proteins and mechanism of conjugation are highly conserved. Table 1 list proteins of the F plasmid conjugation system, with homologs (e.g., for RP4, Ti plasmid, etc.) shown. The F plasmid backbone is composed of the tra regions encoding all genes involved in conjugational transfer; the origin of transfer oriT; the leading region, which is the first to be transferred into the recipient cell; and the maintenance region involved in plasmid replication and partition. The initiation of conjugation requires the expression of the tra genes. Some of the produced Tra proteins form the T4SS and the conjugative pilus that will recruit the recipient cell and mediate mating pair stabilization. Other Tra proteins constitute the relaxosome (TraI, TraM, and TraY), which, in combination with the integration host factor (IHF), bind to the oriT and prepare the plasmid for transfer by inducing the nicking reaction by the TraI relaxase. Interaction between the relaxosome and the Type IV Coupling Protein (T4CP) initiates the transfer of the T-strand by the T4SS. Transfer of the TraI-bound T-strand in the recipient is concomitant with the conversion of the ssDNA into dsDNA by Rolling Circle Replication (RCR) in the donor. Upon entry into the recipient, the ssDNA T-strand is coated by the host chromosomal SSB, and the single-stranded promotor Frpo adopts a stem-loop structure recognized by the host RNA polymerase to initiate the synthesis of RNA primers. TraI performs the circularization of the fully internalized T-strand. The RNA-DNA duplex is recognized by the host DNA polymerase to initiate the complementary strand synthesis reaction.

TABLE 1
Conjugation Proteins

| Protein (F plasmid) | Proposed Function | Homolog |
|---|---|---|
| TraM | Relaxosome | |
| TraJ | Regulation | |
| TraY | Relaxosome Regulation | |
| TraA | Pilin | VirB2 (pTi); TrbC (RP4) |
| TraL | Pilus assembly | VirB3 (pTi); TrbD (RP4) |
| TraE | Pilus assembly | VirB5 (pTi) |
| TraK | Pilus assembly | VirB9 (pTi) |
| TraB | Pilus extension | VirB10 (pTi); TrbI (RP4) |
| TraP | Pilus extension | |
| TraG | Pilus assembly; Mating pair stabilization; | VirB6/VirB8 (pTi) |
| | Exclusion | |
| TraV | Pilus extension | VirB7 (pTi) |
| TraR | Regulation | |
| TraC | Pilus assembly | VirB4 (pTi); TrbE (RP4) |
| TraW | Pilus extension | |
| TraU | DNA transfer | |
| TraN | Mating pair stabilization; Exclusion system | |
| TraF | Pilus extension | |
| TraQ | Pilin maturation | |
| TraH | Pilus extension | |
| TraG | Pilus assembly; Mating pair stabilization; | VirB6/VirB8 (pTi) |
| | Exclusion | |
| TraS | Entry Exclusion (Eex) | |
| TraT | Surface exclusion (Sfx) | |
| TraD | T4CP | VirD4 (pTi); TraG (RP4); TrwB |
| | | (R388) |
| TraI | Relaxosome | VirD2 (pTi); TrwC (R388) |
| TraX | Pilin maturation | TrbP (RP4) |

[0107] In some embodiments, the first and/or second delivery module comprises or is derived from a bacterial conjugation system. In some embodiments, the bacterial conjugation system is an RP4 (InCP), pKM101 (IneN), R388 (IneW), F, or Tumor-inducing (Ti) system.

[0108] In some embodiments, the bacterial conjugation system is an RP4 (IncP) plasmid system, and wherein: the at least one cis-acting component comprises an RP4 origin of transfer (oriT) sequence. The oriT sequence can comprise or consist of a sequence of SEQ ID NO: 384 or a sequence that is at least 80%, 85%, 90%, 95%, 98%, 99%, or 100% (e.g., 80%, 81%, 82%, 83%, 84%, 85%, 86%, 87%, 88%, 89%, 90%, 91%, 92%, 93%, 94%, 95%, 96%, 97%, 98%, 99%, 100%, or a number or a range between any two of these values) identical to SEQ ID NO: 384; and the one or more trans-acting components comprise or are derived from gene products of the RP4 plasmid.

[0109] In some embodiments, the bacterial conjugation system is a Ti plasmid system, and wherein: the at least one cis-acting component comprises a Ti origin of transfer (oriT) sequence; and the one or more trans-acting components comprise or are derived from gene products of the Ti plasmid. In some embodiments, the bacterial conjugation system is a pKM101 (IncN) plasmid system, and wherein: the at least one cis-acting component comprises a pKM101 (IncN) origin of transfer (oriT) sequence; and the one or more trans-acting components comprise or are derived from gene products of the pKM101 (IncN) plasmid. In some embodiments, the bacterial conjugation system is an R388 (IncW) plasmid system, and wherein: the at least one cis-acting component comprises an R388 (IncW) origin of transfer (oriT) sequence; and the one or more trans-acting components comprise or are derived from gene products of the R388 (IncW) plasmid. In some embodiments, the bacterial conjugation system is an F plasmid system, and wherein: the at least one cis-acting component comprises an F plasmid origin of transfer (oriT) sequence; and the one or more trans-acting components comprise or are derived from gene products of the F plasmid.

### Integrator Module

[0110] Provided herein are integrator modules. The integrator module can be derived from a transposase system or a site-directed DNA recombinase system.

[0111] Integrator modules of the disclosure (e.g., integrator module, and first and/or second orthogonal integrator modules) can comprise or be derived from CRISPR-associated transposons or CASTs. CASTs are mobile genetic elements (MGEs) that have evolved to make use of minimal CRISPR systems for RNA-guided transposition of their DNA. Unlike traditional CRISPR systems that contain interference mechanisms to degrade targeted DNA, CASTs lack proteins and/or protein domains responsible for DNA cleavage. Specialized transposon machinery, similar to that of Tn7 transposon, complexes with the CRISPR RNA (crRNA) and associated Cas proteins for transposition. CAST systems have been characterized in a wide range of bacteria and make use of variable CRISPR configurations including Type I-F, Type I-B, Type I-C, Type I-D, Type I-E, Type IV, and Type V-K.

[0112] Many CRISPR-associated transposons are similar to the Tn7 transposon that functions with a cut and paste mechanism. It contains a heteromeric transposase consisting of TnsA and TnsB proteins, and a regulator protein TnsC. Structural analysis has shown binding of the TnsB protein and sequence specific motifs on the ends of the transposon which allows for excision and mobility. Targeting for integration is done by the TnsD or TnsE proteins which preferentially target safe sites within the host chromosome or mobile elements (plasmids or bacteriophages), respectively. TnsE is not found in CASTs but a TnsD homolog, TniQ, is present and functions to bridge the gap between the transposase and CRISPR-Cas. Multiple CRISPR types have been found to associate with transposons with two of the most studied being Type I-F, which makes use of a multi-subunit effector, and Type V-K, which makes use of a single Cas12k effector. In both cases, Tn7 transposons have evolved to make use of these effectors to create R loops for site-specific integration. While TnsA is present in Type I-F systems, it is notably absent in Type V-K systems which showed higher off-target integrations during initial characterization.

[0113] A Type I-F3 CAST (Tn6677) was initially identified in Vibrio Cholerae and has been extensively studied. This system contains proteins TnsA, TnsB, and TnsC that complex with Cas6, Cas7, and a Cas5-Cas8 fusion through interactions with TniQ. Initial integration steps include TniQ complexed with Cas proteins, which binds at the target site, and TnsA and TnsB excision of the transposon, which is followed by TnsC binding to TniQ and transposase binding to TnsC. There can be off-targeting prior to this final step, but TnsB and TnsC binding leads to a final proofreading step to maintain a high on-target percentage. Tn6677 integration has been validated at near 100% on-target efficiency at site specific locations in multiple points in the host genome. Other systems have also been characterized and validated in this class with varying ranges of efficiency, and include orthogonal systems for multiplexed insertions up to 10 kb.

[0114] A Type V-K system was originally characterized from a cyanobacteria, Scytonema hofmanni, and contains a single Cas effector, Cas12k, that functions with a tracrRNA. This system functions similarly to Tn7 but does not have a TnsA protein, which can result in off-targeting and chimera formation during over-expression. The Cas12k and tracrRNA complex bind to the target site and TnsC is polymerized directly adjacent prior to TniQ attachment and TnsB recognition and integration. While these systems use traditional tracrRNA characteristic of Type II CRISPR systems, they can also target with short crRNA located adjacent to the transposon end. Type V-K spacers preferentially target locations near tRNA genes, but other sites have been observed in these short crRNA guides.

[0115] The integrator module can be derived from a Type I-B, Type I-D, Type I-F, or Type V-K CRISPR-associated transposase system of a bacteria. The bacteria can comprise Vibrio cholera (Vch), Pseudoalteromonas (Pse), or Scytonema hofmanni (Sho). The integrator module can be derived from the Type I-F CRISPR-associated transposase system.

[0116] The Type I-F CRISPR-associated transposase system can be Tn6677, Tn7000, Tn7001, Tn7002, Tn7003, Tn7004, Tn7005, Tn7006, Tn7007, Tn7008, Tn7009, Tn6900, Tn7010, Tn7011, Tn7012, Tn7013, Tn7014, Tn7015, Tn7016, Tn7017. The Type I-F CRISPR-associated transposase system can be Tn6677.

[0117] In some embodiments: the one or more components of the integrator module comprise: i) an RNA-guided DNA binding complex, wherein the RNA-guided DNA binding complex comprises one or more Cas proteins, a transposase, one or more crRNAs, or any combination thereof, and ii) a transposition complex comprising one or more transposases; and the first integration sequence of the first and/or second Cassette^{START} comprises an R-TE (RE) and the second integration sequence of the first and/or second Cassette^{STOP} comprises an L-TE (LE).

[0118] The RE can comprise the sequence of any one of SEQ ID NOs: 361 or a sequence having one, two or three mismatches relative to the sequence of any one of SEQ ID NOs: 361. The LE can comprise the sequence of any one of SEQ ID NOs: 362 or a sequence having one, two or three mismatches relative to the sequence of any one of SEQ ID NOs: 362.

[0119] The one or more Cas proteins can comprise a Cas6 protein, a Cas7 protein, and a Cas8 protein. The Cas6 protein can comprise or consist of an amino acid sequence that is at least 80%, 85%, 90%, 95%, 98%, 99%, or 100% (e.g., 80%, 81%, 82%, 83%, 84%, 85%, 86%, 87%, 88%, 89%, 90%, 91%, 92%, 93%, 94%, 95%, 96%, 97%, 98%, 99%, 100%, or a number or a range between any two of these values) identical to SEQ ID NO: 363. The Cas7 protein can comprise or consist of an amino acid sequence that is at least 80%, 85%, 90%, 95%, 98%, 99%, or 100% (e.g., 80%, 81%, 82%, 83%, 84%, 85%, 86%, 87%, 88%, 89%, 90%, 91%, 92%, 93%, 94%, 95%, 96%, 97%, 98%, 99%, 100%, or a number or a range between any two of these values) identical to SEQ ID NO: 364. The Cas8 protein can comprise or consist of an amino acid sequence that is at least 80%, 85%, 90%, 95%, 98%, 99%, or 100% (e.g., 80%, 81%, 82%, 83%, 84%, 85%, 86%, 87%, 88%, 89%, 90%, 91%, 92%, 93%, 94%, 95%, 96%, 97%, 98%, 99%, 100%, or a number or a range between any two of these values) identical to SEQ ID NO: 365. The transposase of the RNA-guided DNA binding complex can comprise or consist of a TniQ protein. The TniQ protein can comprise an amino acid sequence that is at least 80%, 85%, 90%, 95%, 98%, 99%, or 100% (e.g., 80%, 81%, 82%, 83%, 84%, 85%, 86%, 87%, 88%, 89%, 90%, 91%, 92%, 93%, 94%, 95%, 96%, 97%, 98%, 99%, 100%, or a number or a range between any two of these values) identical to SEQ ID NO: 366. The RNA-guided DNA binding complex can comprise one or more helper accessory proteins comprising ClpX and/or ClpP.

[0120] The one or more transposases of the transposition complex can comprise a TnsA protein, a TnsB protein, and a TnsC protein. The one or more transposases of the transposition complex can comprise a TnsAB fusion protein and a TnsC protein. The TnsA protein can comprise or consist of an amino acid sequence that is at least 80%, 85%, 90%, 95%, 98%, 99%, or 100% (e.g., 80%, 81%, 82%, 83%, 84%, 85%, 86%, 87%, 88%, 89%, 90%, 91%, 92%, 93%, 94%, 95%, 96%, 97%, 98%, 99%, 100%, or a number or a range between any two of these values) identical to SEQ ID NO: 367. The TnsB protein can comprise or consist of an amino acid sequences that is at least 80%, 85%, 90%, 95%, 98%, 99%, or 100% (e.g., 80%, 81%, 82%, 83%, 84%, 85%, 86%, 87%, 88%, 89%, 90%, 91%, 92%, 93%, 94%, 95%, 96%, 97%, 98%, 99%, 100%, or a number or a range between any two of these values) identical to SEQ ID NO: 368. The TnsC protein can comprise or consist of an amino acid sequence that is at least 80%, 85%, 90%, 95%, 98%, 99%, or 100% (e.g., 80%, 81%, 82%, 83%, 84%, 85%, 86%, 87%, 88%, 89%, 90%, 91%, 92%, 93%, 94%, 95%, 96%, 97%, 98%, 99%, 100%, or a number or a range between any two of these values) identical to any one of SEQ ID NOs: 369.

[0121] The integrator module can be derived from a Type V-K CRISPR-associated transposase system. In some embodiments: the one or more components of the integrator module comprise: i) an RNA-guided DNA binding complex, wherein the RNA-guided DNA binding complex comprises a Cas protein and one or more crRNAs, or any combination thereof, and ii) a transposition complex comprising one or more transposases; and wherein the first integration sequence of the first and/or second Cassette^{START} comprises an R-TE (RE) and the second integration sequence of the first and/or second Cassette^{STOP} comprises an L-TE (RE).

[0122] The Cas protein can comprise Cas12k. The one or more transposases of the transposition complex can comprise TniQ, TnsB, TnsC, or any combination thereof. In some embodiments, at least one of the one or more crRNAs comprise a spacer that is complementary to a search target sequence on a first strand of the first double stranded target sequence. In some embodiments, at least one of the one or more crRNAs comprise a spacer that is complementary to a search target sequence on a first strand of the second double-stranded target sequence.

crRNAs

[0123] The terms “gRNA,” “guide RNA”, “CRISPR guide sequence” or “crRNA” may be used interchangeably throughout and refer to a nucleic acid comprising a sequence that determines the binding specificity of the RNA-guided DNA-binding complex. A crRNA hybridizes to (complementary to, partially or completely) a double-stranded target sequence (e.g., in the genome) in a cell. The crRNA can comprise a spacer that hybridizes to a search target sequence on a first strand of the double stranded target sequence (a target site). The spacer may be between 15-35 nucleotides, 18-33 nucleotides, or 19-35 nucleotides in length. In some embodiments, the crRNA sequence that hybridizes to the target site is 15, 16, 17, 18, 19, 20, 21, 22, 23, 24, 25 26, 27, 28, 29, 30, 31, 32, or 33 nucleotides in length. In some embodiments, the crRNA sequence that hybridizes to the target site is between 10-30, or between 15-25, or 25-35 nucleotides in length.

[0124] To facilitate crRNA design, many computational tools have been developed (See Prykhozhij et al (PLoS ONE, 10(3): (2015)); Zhu et al. (PLoS ONE, 9(9) (2014)); Xiao et al. (Bioinformatics. January 21 (2014)); Heigwer et al. (Nat Methods, 11(2); 122-123 (2014)). Methods and tools for guide RNA design are discussed by Zhu (Frontiers in Biology, 10 (4) pp 289-296 (2015)), which is incorporated by reference herein. Additionally, there are many publicly available software tools that can be used to facilitate the design of crRNA(s); including but not limited to, Genscript Interactive CRISPR gRNA Design Tool, WU-CRISPR, and Broad Institute GPP sgRNA Designer. There are also publicly available pre-designed gRNA sequences to target many genes and locations within the genomes of many species (human, mouse, rat, zebrafish, C. elegans), including but not limited to, IDT DNA Predesigned Alt-R CRISPR-Cas9 guide RNAs, Addgene Validated gRNA Target Sequences, and GenScript Genome-wide gRNA databases.

[0125] In addition to a sequence that binds to a target nucleic acid (e.g., a spacer), in some embodiments, the gRNA may also comprise a scaffold sequence. In some embodiments, such a gRNA may be referred to as a single guide RNA (sgRNA) or a crRNA. Exemplary scaffold sequences will be evident to one of skill in the art and can be found, for example, in Jinek, et al. Science (2012) 337(6096):816-821, and Ran, et al. Nature Protocols (2013) 8:2281-2308. crRNA(s) used in the present disclosure can be between about 5 and 100 nucleotides long, or longer (e.g., 5, 6, 7, 8, 9, 10, 11, 12, 13, 14, 15, 16, 17, 18, 19, 20, 21, 22, 23, 24, 25, 26, 27, 28, 29, 30, 31, 32, 33, 34, 35, 36, 37, 38, 39, 40, 41, 42, 43, 44, 45, 46, 47, 48, 49, 50, 51, 52, 53, 54, 55, 56, 57, 58, 59 60, 61, 62, 63, 63, 64, 65, 66, 67, 68, 69, 70, 71, 72, 73, 74, 75, 76, 77, 78, 79, 80, 81, 82, 83, 84, 85, 86, 87, 88, 89, 90, 91 92, 93, 94, 95, 96, 97, 98, 99, or 100 nucleotides in length, or longer).

[0126] In some embodiments, the gRNA sequence does not comprise a scaffold sequence and a scaffold sequence is expressed as a separate transcript. In such embodiments, the gRNA sequence further comprises an additional sequence that is complementary to a portion of the scaffold sequence and functions to bind (hybridize) the scaffold sequence. The crRNA can comprise a [repeat scaffold]-[spacer]-[repeat scaffold] structure. The first strand of the double stranded target sequence can be the sense strand.

[0127] In some embodiments, the spacer sequence of the crRNA is at least 50%, 55%, 60%, 65%, 70%, 75%, 80%, 85%, 90%, 95%, 96%, 97%, 98%, 99%, or at least 100% complementary to a search target sequence on a first strand of the double stranded target sequence. In some embodiments, the gRNA sequence is at least 50%, 55%, 60%, 65%, 70%, 75%, 80%, 85%, 90%, 95%, 96%, 97%, 98%, 99%, or at least 100% complementary to the 3′ end of the search target sequence on a first strand of the double stranded target sequence (e.g., the last 5, 6, 7, 8, 9, or 10 nucleotides of the 3′ end of the target sequence). The crRNA can comprise a spacer that is complementary to a search target sequence on a first strand of the double stranded target sequence. The first strand of the double stranded target sequence can be the sense strand.

[0128] The target sequence may be flanked by a protospacer adjacent motif (PAM). A PAM site is a nucleotide sequence in proximity to a target sequence. For example, a PAM may be a DNA sequence immediately following the DNA sequence targeted by the RNA-guided DNA binding complex.

[0129] The target sequence may or may not be flanked by a protospacer adjacent motif (PAM) sequence. In some embodiments, a nucleic acid-guided nuclease can only bind a target sequence if an appropriate PAM is present, see, for example Doudna et al., Science, 2014, 346(6213): 1258096, incorporated herein by reference. A PAM can be 5′ or 3′ of a target sequence. A PAM can be upstream or downstream of a target sequence. In some embodiments, the target sequence is immediately flanked on the 3′ end by a PAM sequence. A PAM can be 1, 2, 3, 4, 5, 6, 7, 8, 9, 10 or more nucleotides in length. In some embodiments, a PAM is between 2-6 nucleotides in length. The target sequence may or may not be located adjacent to a PAM sequence (e.g., PAM sequence located immediately 3′ of the target sequence) (e.g., for Type I CRISPR/Cas systems and Type II CRISPR/Cas systems). In some embodiments, e.g., Type I systems, the PAM is on the alternate side of the protospacer (the 5′ end). Makarova et al. describes the nomenclature for all the classes, types and subtypes of CRISPR systems (Nature Reviews Microbiology 13:722-736 (2015)). Guide structures and PAMs are described in by R. Barrangou (Genome Biol. 16:247 (2015)).

[0130] Non-limiting examples of the PAM sequences include: CC, CA, AG, GT, TA, AC, CA, GC, CG, GG, CT, TG, GA, AGG, TGG, T-rich PAMs (such as ITT, TTG, TTC, TTTT, NGG, NGA, NAG, NGGNG and NNAGAAW (W=A or T), NNNNGATT, NAAR (R=A or G), NNGRR (R=A or G), NNAGAA and NAAAAC, where “N” is any nucleotide. In some embodiments, e.g., for Type I-F CAST systems and the systems, nucleic acid compositions and methods described herein, the PAM sequence can be 5′-CN-3′, where “N” is any nucleotide.

[0131] “Complementarity” refers to the ability of a nucleic acid to form hydrogen bond(s) with another nucleic acid sequence by either traditional Watson-Crick or other non-traditional types. A percent complementarity indicates the percentage of residues in a nucleic acid molecule, which can form hydrogen bonds (e.g., Watson-Crick base pairing) with a second nucleic acid sequence. Full complementarity is not necessarily required, provided there is sufficient complementarity to cause hybridization. There may be mismatches distal from the PAM.

[0132] A donor genomic segment can be capable of being integrated at an integration site following binding of the RNA-guided DNA binding complex to the search target sequence. The integration site can be about 48 to 52 base pairs (e.g., 48, 49, 50, 51, or 52 base pairs) downstream of the double stranded target sequence.

[0133] In some embodiments, the one or more crRNAs of the integrator module comprise a scaffold comprising or consisting of the sequence of SEQ ID NO: 385 or a sequence having 80%, 81%, 82%, 83%, 84%, 85%, 86%, 87%, 88%, 89%, 90%, 91%, 92%, 93%, 94%, 95%, 96%, 97%, 98%, 99%, 100%, or a number or a range between any two of these values, identity to the sequence of SEQ ID NO: 385. In some embodiments, the nucleic acid sequence encoding the scaffold of the one or more crRNAs of the integrator module comprises or consists of the sequence of SEQ ID NO: 388 or a sequence having 80%, 81%, 82%, 83%, 84%, 85%, 86%, 87%, 88%, 89%, 90%, 91%, 92%, 93%, 94%, 95%, 96%, 97%, 98%, 99%, 100%, or a number or a range between any two of these values, identity to the sequence of SEQ ID NO: 388.

[0134] In some embodiments, at least one of the one or more crRNAs comprise a spacer that is complementary to a search target sequence on a first strand of the first double stranded target sequence. In some embodiments, at least one of the one or more crRNAs comprise a spacer that is complementary to a search target sequence on a first strand of the second double-stranded target sequence.

### Integrases and Recombinases

[0135] The integrator module can be derived from a transposase system or a site-directed DNA recombinase system. The site-directed DNA recombinase system can comprise a site-directed integrase system.

[0136] The one or more components of the integrator module can comprise an integrase. The integrase can be Bxb1 and the first and/or second integration sequences can comprise an attB site. The genome of the recipient cell can comprise at least one attP site. The one or more components of the integrator module can comprise an integrase. The integrase can be phiC31 and the first and/or second integration sequences can comprise an attB site. The genome of the recipient cell can comprise at least one attP site. The one or more components of the integrator module can comprise a recombinase. The recombinase can be Cre or FLP and the first and/or second integration sequences can comprise a loxP site or an FRT site.

[0137] The genome of the recipient cell can comprise at least one loxP site or FRT site.

### Orthogonal CAST Sequential Integration System (OASIS) Systems

[0138] Provided herein are compositions and methods for generation of donor cells. In some embodiments, Cassette^{START} and Cassette^{STOP} can be integrated into the genome of a cell using methods known in the art, e.g., lambda red recombineering system. There is also provided herein, OASIS (Orthogonal ACE Sequential Integration System) for generation of donor cells. OASIS leverages the diversity of orthogonal Type I-F CASTs to rapidly construct non-enterobacterial ACE donors.

[0139] Disclosed herein include nucleic acid compositions for producing a chimeric or trimeric genome. In some embodiments, the nucleic acid composition comprises: i) a first and/or second start cassette (Cassette^{START}) each comprising, from 5′ to 3′: at least one cis-acting component of a first and/or second delivery module and a first integration sequence; ii) a first and/or second stop cassette (Cassette^{STOP}) each comprising, from 5′ to 3′: a second integration sequence and at least one cis-acting component of the first and/or second delivery module; iii) one or more first helper polynucleotides each comprising a sequence encoding a trans-acting component of the first and/or second delivery module, wherein the first and/or second delivery module comprise one or more trans-acting components; and optionally iv) one or more second helper polynucleotides each comprising a sequence encoding a component of an integrator module, wherein the integrator module comprises one or more components.

[0140] In some embodiments: the first and/or second Cassette^{START} is comprised within a first orthogonal integration vector further comprising one or more third helper polynucleotides each comprising a sequence encoding a component of a first orthogonal integrator module, wherein the first orthogonal integrator module comprises one or more components; and the first and/or second Cassette^{STOP} is comprised within a second orthogonal integration vector further comprising one or more fourth helper polynucleotides each comprising a sequence encoding a component of a second orthogonal integrator module, wherein the second orthogonal integrator module comprises one or more components. In some embodiments, the first and/or second Cassette^{START} is flanked by a 5′ RE and a 3′ LE and the first and/or second Cassette^{STOP} is flanked by a 5′ RE and a 3′ LE, and the integrator module, the first orthogonal integrator module, and the second orthogonal integrator module are orthogonal to each other.

[0141] In some embodiments, the first orthogonal integrator module and/or the second orthogonal integrator module are each derived from a Type I-B, Type I-D, Type I-F, or Type V-K CRISPR-associated transposase system of a bacteria. The bacteria can comprise Vibrio cholera (Vch), Pseudoalteromonas (Pse), or Scytonema hofmanni (Sho). In some embodiments, the first orthogonal integrator module and/or the second orthogonal integrator module are each derived from the Type I-F CRISPR-associated transposase system. The Type I-F CRISPR-associated transposase system can be Tn6677, Tn7000, Tn7001, Tn7002, Tn7003, Tn7004, Tn7005, Tn7006, Tn7007, Tn7008, Tn7009, Tn6900, Tn7010, Tn7011, Tn7012, Tn7013, Tn7014, Tn7015, Tn7016, or Tn7017.

[0142] In some embodiments: the one or more components of the first orthogonal integrator module and/or the one or more components of the second orthogonal integrator module comprise: i) an RNA-guided DNA binding complex, wherein the RNA-guided DNA binding complex comprises a Cas protein, a transposase, one or more crRNAs, or any combination thereof, and ii) a transposition complex comprising one or more transposases.

[0143] The RE can comprise the sequence of any one of SEQ ID NOs: 343-344 or a sequence having one, two or three mismatches relative to the sequence of any one of SEQ ID NOs: 343-344. The LE can comprise the sequence of any one of SEQ ID NOs: 345-346 or a sequence having one, two or three mismatches relative to the sequence of any one of SEQ ID NOs: 345-346.

[0144] The one or more Cas proteins can comprise a Cas6 protein, a Cas7 protein, and a Cas8 protein. The Cas6 protein can comprise or consist of an amino acid sequence that is at least 80%, 85%, 90%, 95%, 98%, 99%, or 100% (e.g., 80%, 81%, 82%, 83%, 84%, 85%, 86%, 87%, 88%, 89%, 90%, 91%, 92%, 93%, 94%, 95%, 96%, 97%, 98%, 99%, 100%, or a number or a range between any two of these values) identical to SEQ ID NO: 347 or SEQ ID NO: 348. The Cas7 protein can comprise or consist of an amino acid sequence that is at least 80%, 85%, 90%, 95%, 98%, 99%, or 100% (e.g., 80%, 81%, 82%, 83%, 84%, 85%, 86%, 87%, 88%, 89%, 90%, 91%, 92%, 93%, 94%, 95%, 96%, 97%, 98%, 99%, 100%, or a number or a range between any two of these values) identical to SEQ ID NO: 349 or SEQ ID NO: 350. The Cas8 protein can comprise or consist of an amino acid sequence that is at least 80%, 85%, 90%, 95%, 98%, 99%, or 100% (e.g., 80%, 81%, 82%, 83%, 84%, 85%, 86%, 87%, 88%, 89%, 90%, 91%, 92%, 93%, 94%, 95%, 96%, 97%, 98%, 99%, 100%, or a number or a range between any two of these values) identical to SEQ ID NO: 351 or SEQ ID NO: 352. The transposase of the RNA-guided DNA binding complex can comprise a TniQ protein. The TniQ protein can comprise or consist of an amino acid sequence that is at least 80%, 85%, 90%, 95%, 98%, 99%, or 100% (e.g., 80%, 81%, 82%, 83%, 84%, 85%, 86%, 87%, 88%, 89%, 90%, 91%, 92%, 93%, 94%, 95%, 96%, 97%, 98%, 99%, 100%, or a number or a range between any two of these values) identical to SEQ ID NO: 353 or SEQ ID NO: 354. The RNA-guided DNA binding complex can comprise one or more helper accessory proteins comprising ClpX and/or ClpP.

[0145] The one or more transposases of the transposition complex can comprise a TnsA protein, a TnsB protein, and a TnsC protein. The one or more transposases of the transposition complex can comprise a TnsAB fusion protein and a TnsC protein. The TnsA protein can comprise or consist of an amino acid sequence that is at least 80%, 85%, 90%, 95%, 98%, 99%, or 100% (e.g., 80%, 81%, 82%, 83%, 84%, 85%, 86%, 87%, 88%, 89%, 90%, 91%, 92%, 93%, 94%, 95%, 96%, 97%, 98%, 99%, 100%, or a number or a range between any two of these values) identical to SEQ ID NO: 355 or SEQ ID NO: 356. The TnsB protein can comprise or consist of an amino acid sequences that is at least 80%, 85%, 90%, 95%, 98%, 99%, or 100% (e.g., 80%, 81%, 82%, 83%, 84%, 85%, 86%, 87%, 88%, 89%, 90%, 91%, 92%, 93%, 94%, 95%, 96%, 97%, 98%, 99%, 100%, or a number or a range between any two of these values) identical to SEQ ID NO: 357 or SEQ ID NO: 358. The TnsC protein can comprise or consist of an amino acid sequence that is at least 80%, 85%, 90%, 95%, 98%, 99%, or 100% (e.g., 80%, 81%, 82%, 83%, 84%, 85%, 86%, 87%, 88%, 89%, 90%, 91%, 92%, 93%, 94%, 95%, 96%, 97%, 98%, 99%, 100%, or a number or a range between any two of these values) identical to SEQ ID NO: 359 or SEQ ID NO: 360.

[0146] In some embodiments: the one or more crRNAs of the first orthogonal integrator module comprise a scaffold comprising the sequence of SEQ ID NO: 389 or a sequence having 80%, 81%, 82%, 83%, 84%, 85%, 86%, 87%, 88%, 89%, 90%, 91%, 92%, 93%, 94%, 95%, 96%, 97%, 98%, 99%, 100%, or a number or a range between any two of these values, identity to SEQ ID NO: 389. In some embodiments, the nucleic acid sequence encoding the scaffold of the one or more crRNAs of the first orthogonal integrator module comprises the sequence of SEQ ID NO: 386 or a sequence having 80%, 81%, 82%, 83%, 84%, 85%, 86%, 87%, 88%, 89%, 90%, 91%, 92%, 93%, 94%, 95%, 96%, 97%, 98%, 99%, 100%, or a number or a range between any two of these values, identity to SEQ ID NO: 386.

[0147] In some embodiments, the one or more crRNAs of the second orthogonal integrator module comprise a scaffold comprising the sequence of SEQ ID NO: 390 or a sequence having 80%, 81%, 82%, 83%, 84%, 85%, 86%, 87%, 88%, 89%, 90%, 91%, 92%, 93%, 94%, 95%, 96%, 97%, 98%, 99%, 100%, or a number or a range between any two of these values, identity to SEQ ID NO: 390. In some embodiments, the nucleic acid sequence encoding the scaffold of the one or more crRNAs of the second orthogonal integrator module comprises the sequence of SEQ ID NO: 387 or a sequence having 80%, 81%, 82%, 83%, 84%, 85%, 86%, 87%, 88%, 89%, 90%, 91%, 92%, 93%, 94%, 95%, 96%, 97%, 98%, 99%, 100%, or a number or a range between any two of these values, identity to SEQ ID NO: 387.

[0148] In some embodiments, one of the one or more crRNAs of the first orthogonal integrator module comprises a spacer that is complementary to a search target sequence on a first strand of an upstream double stranded target sequence of a cell and/or one of the one or more the crRNAs of the second orthogonal integrator module comprises a spacer that is complementary to a search target sequence on a first strand of a downstream double stranded target sequence of the cell, wherein

[0149] upon expression of the one or more components of the first orthogonal integrator module and/or the one or more components of the second orthogonal integrator module in the cell, the first and/or second Cassette^{START} is capable of being inserted into the upstream double-stranded target sequence in the genome of the cell and the first and/or second Cassette^{STOP} is capable of being inserted into the downstream double stranded target sequence in the genome of the cell, thereby generating a donor cell.

### Screening and Selection Markers

[0150] The polynucleotides described herein can comprise one or more screen and/or selection markers. In some embodiments, the first and/or second Cassette^{START}, the first and/or second Cassette^{STOP} or any combination thereof are labeled with screening and/or selection markers As used herein, the term “selectable marker” shall be given its ordinary meaning and shall also refer a gene introduced into cells, e.g., bacteria or cells in culture, which confers one or more traits suitable for artificial selection. As used herein, the term “screenable marker” shall be given its ordinary meaning and shall also refer to a gene introduced into cells, e.g., bacteria or cells in culture, which confers one or more traits suitable for phenotyping screening, e.g., a fluorescent protein.

[0151] The first and/or second Cassette^{START}, the first and/or second Cassette^{STOP} or any combination thereof can comprise: one or more marker polynucleotides each comprising a sequence encoding a positive or negative screening and/or selection marker. In some embodiments, the one or more marker polynucleotides are situated 5′ of the at least one cis-acting component of the first and/or second delivery module in the first and/or second Cassette^{START} and/or the one or more marker polynucleotides are situated 5′ of the second integration sequence in the first and/or second Cassette^{STOP}.

[0152] In some embodiments: the positive screening and/or selection marker is selected from the group comprising: a fluorescent protein, an antibiotic resistance cassette, an enzyme, or any combination thereof. The enzyme can be 0-galactosidase. In some embodiments, the negative screening and/or selection marker is selected from the group comprising: a fluorescent protein, an enzyme, or a combination thereof. The enzyme can be encoded by the sacB gene and/or the pheS^{mut} gene.

[0153] In some embodiments, the antibiotic resistance cassette confers resistance to an antibiotic comprising phleomycin D1 (ZEOCIN™), kanamycin, spectinomycin, streptomycin, ampicillin, carbenicillin, bleomycin, erythromycin, polymyxin B, tetracycline, chloramphenicol, or any combination thereof. The fluorescent protein can comprise green fluorescent protein (GFP), enhanced green fluorescent protein (EGFP), yellow fluorescent protein (YFP), enhanced yellow fluorescent protein (EYFP), blue fluorescent protein (BFP), red fluorescent protein (RFP), TagRFP, Dronpa, Padron, mScarlet, mApple, mCitrine, mCherry, mruby3, rsCherry, rsCherryRev, derivatives thereof, or any combination thereof.

[0154] The first and/or second Cassette^{START}, the first and/or second Cassette^{STOP} can be configured such that the positive screening and/or selection marker can be removed. At least one of the one or more marker polynucleotides can be flanked by recombinase sites. In some embodiments, the one or more marker polynucleotides of the first Cassette^{START} and/or the first Cassette^{STOP} can be flanked by recombinase sites. In some embodiments, the at least one of the one or more marker polynucleotides of the first Cassette^{START} and/or the first Cassette^{STOP} flanked by recombinase sites are capable of being removed from the genome of the recipient cell comprising the chimeric genome upon expression of at least one recombinase or integrase in the recipient cell comprising the chimeric genome. The at least one recombinase or integrase can comprise phiC31, Bxb1, Cre, and/or FLP.

### Polynucleotides

[0155] Disclosed herein include systems for producing a chimeric or trimeric genome. In some embodiments, the system comprises: a) a donor cell comprising: (i) a first start cassette (Cassette^{START}) comprising, from 5′ to 3′, at least one cis-acting component of a first delivery module and a first integration sequence, and (ii) a first stop cassette (Cassette^{STOP}) comprising, from 5′ to 3′, a second integration sequence and at least one cis-acting component of the first delivery module, wherein the first Cassette^{START} is integrated at a first site in the genome of the donor cell and the first Cassette^{STOP} is integrated at a second site in the genome of the donor cell, wherein intervening sequence between the first Cassette^{START} and the first Cassette^{STOP} defines a first genomic transfer window; and (iii) one or more trans-acting components of the first delivery module or one or more first helper polynucleotides each comprising a sequence encoding a trans-acting component of the first delivery module, wherein the first delivery module comprises the one or more trans-acting components; and b) a recipient cell comprising one or more components of an integrator module or one or more second helper polynucleotides each comprising a sequence encoding a component of an integrator module, wherein the integrator module comprises the one or more components.

[0156] Disclosed herein include nucleic acid compositions for producing a chimeric or trimeric genome. In some embodiments, the nucleic acid composition comprises: i) a first and/or second start cassette (Cassette^{START}) each comprising, from 5′ to 3′: at least one cis-acting component of a first and/or second delivery module and a first integration sequence; ii) a first and/or second stop cassette (Cassette^{STOP}) each comprising, from 5′ to 3′: a second integration sequence and at least one cis-acting component of the first and/or second delivery module; iii) one or more first helper polynucleotides each comprising a sequence encoding a trans-acting component of the first and/or second delivery module, wherein the first and/or second delivery module comprise one or more trans-acting components; and optionally iv) one or more second helper polynucleotides each comprising a sequence encoding a component of an integrator module, wherein the integrator module comprises one or more components.

[0157] In some embodiments: the first and/or second Cassette^{START} is comprised within a first orthogonal integration vector further comprising one or more third helper polynucleotides each comprising a sequence encoding a component of a first orthogonal integrator module, wherein the first orthogonal integrator module comprises one or more components; and the first and/or second Cassette^{STOP} is comprised within a second orthogonal integration vector further comprising one or more fourth helper polynucleotides each comprising a sequence encoding a component of a second orthogonal integrator module, wherein the second orthogonal integrator module comprises one or more components. In some embodiments, the first and/or second Cassette^{START} is flanked by a 5′ RE and a 3′ LE and the first and/or second Cassette^{STOP} is flanked by a 5′ RE and a 3′ LE, and the integrator module, the first orthogonal integrator module, and the second orthogonal integrator module are orthogonal to each other.

[0158] One or more of the one or more first helper polynucleotides can comprise a first promoter operably linked to the sequence encoding a trans-acting component of the first and/or second delivery module. One or more of the one or more second helper polynucleotides can comprise a second promoter operably linked to the sequence encoding a component of an integrator module. One or more of the one or more third helper polynucleotides can comprise a third promoter operably linked to the sequence encoding a component of a first orthogonal integrator module. One or more of the one or more fourth helper polynucleotides can comprise a fourth promoter operably linked to the sequence encoding a component of a second orthogonal integrator module. The first, second, third, and/or fourth promoters can be the same or different.

[0159] The first, second, third, and/or fourth promoters can comprise a constitutive promoter, an inducible promoter, or a combination thereof. The first, second, third, and/or fourth promoters can comprise the TlpA operator/promoter, lambda phage pL, lambda phage pR, lambda phage pRM, or any combination thereof. In some embodiments, the first, second, third, and/or fourth promoters comprise a promoter selected from the group comprising: a bacteriophage promoter, (e.g., Pls1con, T3, T7, SP6, or PL); a bacterial promoter, (e.g., Pbad, PmgrB, Ptrc2, Plac/ara, Ptac, or Pm); and/or a bacterial-bacteriophage hybrid promoter, (e.g., PLlacO or PLtetO). In some embodiments, the first, second, third, and/or fourth promoters comprise a positively regulated E. coli promoter selected from the group comprising: a σ⁷⁰ promoter, (e.g., inducible pBad/araC promoter, Lux cassette right promoter, modified lambda Prm promoter, plac Or2-62 (positive), pBad/AraC with extra REN sites, pBad, P(Las) TetO, P(Las) CIO, P(Rhl), Pu, FecA, pRE, cadC, hns, pLas, or pLux); a as promoter, (e.g., Pdps); a σ³² promoter, (e.g., heat shock); and/or a σ⁵⁴ promoter, (e.g., glnAp2).

[0160] In some embodiments, the first, second, third, and/or fourth promoters comprise a negatively regulated E. coli promoter selected from the group comprising: a σ⁷⁰ promoter, (e.g., Promoter (PRM+), modified lambda Prm promoter, TetR-TetR-4C P(Las) TetO, P(Las) CIO, P(Lac) IQ, RecA_DlexO_DLacO1, dapAp, FecA, Pspac-hy, pcI, plux-cI, plux-lac, CinR, CinL, glucose controlled, modifed Pr, modifed Prm+, FecA, Pcya, rec A (SOS), Rec A (SOS), EmrR_regulated, BetI_regulated, pLac_lux, pTet_Lac, pLac/Mnt, pTet/Mnt, LsrA/cI, pLux/cI, LacI, LacIQ, pLacIQ1, pLas/cI, pLas/Lux, pLux/Las, pRecA with LexA binding site, reverse BBa_R0011, pLacI/ara-1, pLaclq, rrnB P1, cadC, hns, PfhuA, pBad/araC, nhaA, OmpF, or RcnR); a as promoter, (e.g., Lutz-Bujard LacO with alternative sigma factor σ³⁸); a σ³² promoter, (e.g., Lutz-Bujard LacO with alternative sigma factor σ³²); and/or a σ⁵⁴ promoter, (e.g., glnAp2).

[0161] The first, second, third, and/or fourth promoters can comprise a P7 promoter. The first, second, third, and/or fourth promoters can comprise a heat-shock promoter, (e.g., pTSR, pR-pL, GrpE, HtpG, Lon, RpoH, Clp, and/or DnaK). The first, second, third, and/or fourth promoters can comprise a constitutive Escherichia coli as promoter, (e.g., osmY promoter (BBa_J45993)); a constitutive Escherichia coli σ³² promoter, (e.g., htpG heat shock promoter (BBa_J45504)); a constitutive Escherichia coli σ⁷⁰ promoter, (e.g., lacq promoter (BBa_J54200 or BBa_J56015), E. coli CreABCD phosphate sensing operon promoter (BBa_J64951), GlnRS promoter (BBa_K088007), lacZ promoter (BBa_K119000 or BBa_K119001), M13K07 gene I promoter (BBa_M13101), M13K07 gene II promoter (BBa_M13102), M13K07 gene III promoter (BBa_M13103), M13K07 gene IV promoter (BBa_M13104), M13K07 gene V promoter (BBa_M13105), M13K07 gene VI promoter (BBa_M13106), M13K07 gene VIII promoter (BBa_M13108), or M13110 (BBa_M13110)); a constitutive Bacillus subtilis σ^{A} promoter, (e.g., promoter veg (BBa_K143013), promoter 43 (BBa_K143013), P_{liaG} (BBa_K823000), P_{lepA} (BBa_K823002), or P_{veg} (BBa_K823003)); a constitutive Bacillus subtilis σ^{B} promoter, (e.g., promoter ctc (BBa_K143010) or promoter gsiB (BBa_K143011)); a Salmonella promoter, (e.g., Pspv2 from Salmonella (BBa_K112706) or Pspv from Salmonella (BBa_K112707)); a bacteriophage T7 promoter (e.g., BBa_I712074, BBa 1719005, BBa_J34814, BBa_J64997, BBa_K113010, BBa_K113011, BBa_K113012, BBa_R0085, BBa_R0180, BBa_R0181, BBa_R0182, BBa_R0183, BBa_Z0251, BBa_Z0252, or BBa_Z0253); and/or a bacteriophage SP6 promoter (e.g., SP6 promoter (BBa_J64998)). The first, second, third, and/or fourth promoters can comprise an Arabinose inducible promoter (P^{Ara}).

[0162] In some embodiments: the one or more first helper polynucleotides are situated on the same nucleic acid or different nucleic acids; and/or the one or more second helper polynucleotides are situated on the same nucleic acid or different nucleic acids. In some embodiments: two or more of the one or more first helper polynucleotides situated on the same nucleic acid, two or more of the one or more second helper polynucleotides situated on the same nucleic acid, two or more of the one or more third helper polynucleotides comprised within the first orthogonal integration vector, and/or two or more of the one or more fourth helper polynucleotides comprised within the second orthogonal integration vector, are comprised within an operon or operably linked via a tandem expression element. In some embodiments, the tandem expression element is selected from the group comprising a bacterial ribosome binding site (RBS), an internal ribosomal entry site (IRES), foot-and-mouth disease virus 2A peptide (F2A), equine rhinitis A virus 2A peptide (E2A), porcine teschovirus 2A peptide (P2A) or Thosea asigna virus 2A peptide (T2A), or any combination thereof.

[0163] Any of the one or more first helper polynucleotides, the one or more second helper polynucleotides, the one or more third helper polynucleotides, the one or more fourth helper polynucleotides, and/or the bacterial operon can comprise a 5′UTR and/or a 3′ UTR. The one or more first helper polynucleotides, the one or more second helper polynucleotides, the one or more third helper polynucleotides, and/or the one or more fourth helper polynucleotides can comprise a transcript stabilization element. The one or more first helper polynucleotides or the one or more second helper polynucleotides can be comprised within one or more vectors. The one or more vectors, the first orthogonal vector, and/or the second orthogonal vector can comprise an RNA viral vector, a DNA viral vector, a plasmid vector, an artificial chromosome, or any combination thereof.

[0164] The first and/or second Cassette^{START} can comprise or consist of the sequence of SEQ ID NO: 370 or a sequence that is at least 80%, 85%, 90%, 95%, 98%, 99%, or 100% (e.g., 80%, 81%, 82%, 83%, 84%, 85%, 86%, 87%, 88%, 89%, 90%, 91%, 92%, 93%, 94%, 95%, 96%, 97%, 98%, 99%, 100%, or a number or a range between any two of these values) identical to SEQ ID NO: 370. The first and/or second Cassette^{STOP} can comprise or consist of the sequence of SEQ ID NO: 371 or a sequence that is at least 80%, 85%, 90%, 95%, 98%, 99%, or 100% (e.g., 80%, 81%, 82%, 83%, 84%, 85%, 86%, 87%, 88%, 89%, 90%, 91%, 92%, 93%, 94%, 95%, 96%, 97%, 98%, 99%, 100%, or a number or a range between any two of these values) identical to SEQ ID NO: 371. The first and/or second Cassette^{START} flanked by a 5′ RE and a 3′ LE and can comprise or consist of the sequence of any one of SEQ ID NOs: 372-373 or a sequence that is at least 80%, 85%, 90%, 95%, 98%, 99%, or 100% (e.g., 80%, 81%, 82%, 83%, 84%, 85%, 86%, 87%, 88%, 89%, 90%, 91%, 92%, 93%, 94%, 95%, 96%, 97%, 98%, 99%, 100%, or a number or a range between any two of these values) identical to any one of SEQ ID NOs: 372-373.

[0165] The first and/or second Cassette^{STOP} flanked by a 5′ RE and a 3′ LE can comprise or consist of the sequence of any one of SEQ ID NOs: 374-375 or a sequence that is at least 80%, 85%, 90%, 95%, 98%, 99%, or 100% (e.g., 80%, 81%, 82%, 83%, 84%, 85%, 86%, 87%, 88%, 89%, 90%, 91%, 92%, 93%, 94%, 95%, 96%, 97%, 98%, 99%, 100%, or a number or a range between any two of these values) identical to any one of SEQ ID NOs: 374-375.

[0166] In some embodiments: the two or more first helper polynucleotides comprised within an operon or operably linked via a tandem expression element comprise or consist of the sequence of SEQ ID NO: 376 or a sequence that is at least 80%, 85%, 90%, 95%, 98%, 99%, or 100% (e.g., 80%, 81%, 82%, 83%, 84%, 85%, 86%, 87%, 88%, 89%, 90%, 91%, 92%, 93%, 94%, 95%, 96%, 97%, 98%, 99%, 100%, or a number or a range between any two of these values) identical to any one of SEQ ID NO: 376; the two more second helper polynucleotides comprised within an operon or operably linked via a tandem expression element comprise or consist of the sequence of SEQ ID NO: 377 or a sequence that is at least 80%, 85%, 90%, 95%, 98%, 99%, or 100% (e.g., 80%, 81%, 82%, 83%, 84%, 85%, 86%, 87%, 88%, 89%, 90%, 91%, 92%, 93%, 94%, 95%, 96%, 97%, 98%, 99%, 100%, or a number or a range between any two of these values) identical to any one of SEQ ID NO: 377; the two or more third helper polynucleotides comprised within an operon or operably linked via a tandem expression element comprise or consist of the sequence of SEQ ID NO: 378 or a sequence that is at least 80%, 85%, 90%, 95%, 98%, 99%, or 100% (e.g., 80%, 81%, 82%, 83%, 84%, 85%, 86%, 87%, 88%, 89%, 90%, 91%, 92%, 93%, 94%, 95%, 96%, 97%, 98%, 99%, 100%, or a number or a range between any two of these values) identical to any one of SEQ ID NO: 378; and/or the two or more fourth helper polynucleotides comprised within an operon or operably linked via a tandem expression element comprise or consist of the sequence of SEQ ID NO: 379 or a sequence that is at least 80%, 85%, 90%, 95%, 98%, 99%, or 100% (e.g., 80%, 81%, 82%, 83%, 84%, 85%, 86%, 87%, 88%, 89%, 90%, 91%, 92%, 93%, 94%, 95%, 96%, 97%, 98%, 99%, 100%, or a number or a range between any two of these values) identical to any one of SEQ ID NO: 379.

[0167] In some embodiments, the two or more first helper polynucleotides are comprised within a plasmid, and the plasmid comprises the sequence of SEQ ID NO: 380 or a sequence having 80%, 81%, 82%, 83%, 84%, 85%, 86%, 87%, 88%, 89%, 90%, 91%, 92%, 93%, 94%, 95%, 96%, 97%, 98%, 99%, 100%, or a number or a range between any two of these values, identity to the sequence of SEQ ID NO: 380. In some embodiments, the two more second helper polynucleotides are comprised within a plasmid, and the plasmid comprises the sequence of SEQ ID NO: 381 or a sequence having 80%, 81%, 82%, 83%, 84%, 85%, 86%, 87%, 88%, 89%, 90%, 91%, 92%, 93%, 94%, 95%, 96%, 97%, 98%, 99%, 100%, or a number or a range between any two of these values, identity to the sequence of SEQ ID NO: 381. In some embodiments, the first orthogonal integration vector comprises the sequence of SEQ ID NO: 382 or a sequence having 80%, 81%, 82%, 83%, 84%, 85%, 86%, 87%, 88%, 89%, 90%, 91%, 92%, 93%, 94%, 95%, 96%, 97%, 98%, 99%, 100%, or a number or a range between any two of these values, identity to the sequence of SEQ ID NO: 382. In some embodiments, the second orthogonal integration vector comprises the sequence of SEQ ID NO: 383 or a sequence having 80%, 81%, 82%, 83%, 84%, 85%, 86%, 87%, 88%, 89%, 90%, 91%, 92%, 93%, 94%, 95%, 96%, 97%, 98%, 99%, 100%, or a number or a range between any two of these values, identity to the sequence of SEQ ID NO: 383.

[0168] The nucleic acid compositions provided herein can comprise one or more components/features of a disclosed sequence (e.g., promoter, oriT, RE/LE, selectable/screenable marker, component of a delivery module, component of an integrator module).

[0169] Provided herein are nucleic acids that are at least 80%, 85%, 90%, 95%, 98%, 99%, or 100% identical to SEQ ID NOS: 1-390, portions thereof, and/or complements thereof. Also provided herein are nucleic acids that comprise at least about 5 consecutive nucleotides (e.g., about 5 nt, 10 nt, 15 nt, 20 nt, 25 nt, 30 nt, 35 nt, 40 nt, 45 nt, 50 nt, 60 nt, 70 nt, 80 nt, 90 nt, 100 nt, 110 nt, 120 nt, 128 nt, 130 nt, 140 nt, 150 nt, 160 nt, 170 nt, 180 nt, 190 nt, 200 nt, 210 nt, 220 nt, 230 nt, 240 nt, 250 nt, 260 nt, 270 nt, 280 nt, 290 nt, 300 nt, 310 nt, 320 nt, 330 nt, 340 nt, 350 nt, 360 nt, 370 nt, 380 nt, 390 nt, 400 nt, 410 nt, 420 nt, 430 nt, 440 nt, 450 nt, 460 nt, 470 nt, 480 nt, 490 nt, 500 nt, 510 nt, 520 nt, 530 nt, 540 nt, 550 nt, 560 nt, 570 nt, 580 nt, 590 nt, 600 nt, 610 nt, 620 nt, 630 nt, 640 nt, 650 nt, 660 nt, 670 nt, 680 nt, 690 nt, 700 nt, 710 nt, 720 nt, 730 nt, 740 nt, 750 nt, 760 nt, 770 nt, 780 nt, 790 nt, 800 nt, 810 nt, 820 nt, 830 nt, 840 nt, 850 nt, 860 nt, 870 nt, 880 nt, 890 nt, 900 nt, 910 nt, 920 nt, 930 nt, 940 nt, 950 nt, 960 nt, 970 nt, 980 nt, 990 nt, 1000 nt, 1500 nt, 2000 nt, 5000 nt, 10000 nt, 50000 nt, or a number or a range between any two of these values) of a sequence described by SEQ ID NOS: 1-390, or a complement thereof.

### METHODS

[0170] Disclosed herein are methods for producing a chimeric genome. In some embodiments, the method comprises: contacting a recipient cell disclosed herein with a donor cell disclosed herein, and: expressing the one or more trans-acting components of the first delivery module in the donor cell, thereby the sequence defined by the genomic transfer window is transferred from the donor cell to the recipient cell and thereby the first donor genomic segment comprising the first donor sequence flanked by the first integration sequence and the second integration sequence of the first Cassette^{START} and the first Cassette^{STOP} is generated in the recipient cell; and expressing the one or more components of the integrator module in the recipient cell, thereby the first donor genomic segment is inserted into the first double-stranded target sequence in the genome of the recipient cell, thereby generating the chimeric genome in the recipient cell.

[0171] The method can comprise repeating the contacting step one or more times, wherein each contacting step comprises contacting an nth-donor cell with the recipient cell, thereby generating a recipient cell comprising an n-meric genome, wherein each nth-donor cell comprises: (i) an nth start cassette (Cassette^{START}) comprising, from 5′ to 3′, at least one cis-acting component of an nth delivery module and an nth integration sequence, and (ii) an nth stop cassette (Cassette^{STOP}) comprising, from 5′ to 3′, an nth integration sequence and at least one cis-acting component of the nth delivery module, wherein the nth Cassette^{START} is integrated at a first site in the genome of the nth donor cell and the nth Cassette^{STOP} is integrated at a second site in the genome of the nth donor cell, wherein intervening sequence between the nth Cassette^{START} and the nth Cassette^{STOP} defines an nth genomic transfer window; and (iii) one or more trans-acting components of the nth delivery module or one or more first helper polynucleotides each comprising a sequence encoding a trans-acting component of the nth delivery module, wherein the nth delivery module comprises the one or more trans-acting components, and optionally wherein the sequence of each nth genomic transfer window is different from each other.

[0172] Disclosed herein are methods for producing a trimeric genome. In some embodiments, the method comprises: (a) contacting a recipient cell of the disclosure with the donor cell of the disclosure, and: expressing the one or more trans-acting components of the first delivery module in the donor cell, thereby the sequence defined by the genomic transfer window is transferred from the donor cell to the recipient cell and thereby the first donor genomic segment comprising the first donor sequence flanked by the first integration sequence and the second integration sequence of the first Cassette^{START} and the first Cassette^{STOP} is generated in the recipient cell; and expressing the one or more components of the integrator module in the recipient cell, thereby the first donor genomic segment is inserted into the first double-stranded target sequence in the genome of the recipient cell, thereby generating the chimeric genome in the recipient cell, and (b) contacting the recipient cell comprising the chimeric genome with a second donor cell of the disclosure, and: expressing the one or more trans-acting components of the second delivery module in the second donor cell, thereby the sequence defined by the second genomic transfer window is transferred from the second donor cell to the recipient cell comprising the chimeric genome and thereby the second donor genomic segment comprising the second donor sequence flanked by the first integration sequence and the second integration sequence of the second Cassette^{START} and the second Cassette^{STOP} is generated in the recipient cell comprising the chimeric genome; and expressing the one or more components of the integrator module in the recipient cell comprising the chimeric genome, thereby the second donor genomic segment is inserted into the second double-stranded target site in the genome of the recipient cell comprising the chimeric genome, thereby generating the trimeric genome in the recipient cell comprising the chimeric genome, optionally wherein the second double-stranded target site is comprised within the first donor genomic segment.

[0173] Prior to the contacting of step (b), the method can comprise expressing at least one recombinase or integrase in the recipient cell comprising the chimeric genome, thereby the at least one of the one or more marker polynucleotides of the first Cassette^{START} and/or the first Cassette^{STOP} flanked by recombinase sites are removed from the genome of the recipient cell comprising the chimeric genome.

[0174] The ratio of donor cell (e.g., donor cell or second donor cell) to recipient cells in the contacting steps can vary. The ratio of the donor cell to the recipient cell can be approximately 4:1 (v/v) and/or the ratio of the second donor cell to the recipient cell comprising the chimeric genome can be approximately 4:1 (v/v). In some embodiments, the ratio can be 1:1, 1.1:1, 1.2:1, 1.3:1, 1.4:1, 1.5:1, 1.6:1, 1.7:1, 1.8:1, 1.9:1, 2:1, 2.5:1, 3:1, 4:1 (v/v), or a number or a range between any two of the values.

[0175] The first and/or second donor genomic segment can be inserted into the first and/or second double-stranded target sequence in the genome of the recipient cell and/or the genome of the recipient cell comprising the chimeric genome at an integration efficiency of at least 10⁴ CFU. In some embodiments, the method has an on-target insertion rate of at least 90% (e.g., 90%, 91%, 92%, 93%, 94%, 95%, 96%, 97%, 98%, 99%, 100%, or a number or a range between any two of these values).

[0176] Disclosed herein are genome-expanded organisms. In some embodiments, the genome-expanded organism comprises a chimeric genome, trimeric genome, or n-meric genome generated by a method provided herein. The chimeric, trimeric genome, or n-meric genome can be stable following at least 100 generations. As provided above, the expanded genomes (e.g., chimeric, trimeric genome, or n-meric genome) can be at least about 4 MB (e.g., megabases) in length. The expanded genome can be at least about 4 MB, 4.5 MB, 5 MB, 6 MB, 6.5 MB, 7 MB, 7.5 MB, 8 MB, 8.5 MB, 9 MB, 9.5 MB, or 10 MB in length. The expanded genome can be, can be at least, or can be at least about 4.0 MB, 4.1 MB, 4.2 MB, 4.3 MB, 4.4 MB, 4.5 MB, 4.6 MB, 4.7 MB, 4.8 MB, 4.9 MB, 5.0 MB, 5.1 MB, 5.2 MB, 5.3 MB, 5.4 MB, 5.5 MB, 5.6 MB, 5.7 MB, 5.8 MB, 5.9 MB, 6.0 MB, 6.1 MB, 6.2 MB, 6.3 MB, 6.4 MB, 6.5 MB, 6.6 MB, 6.7 MB, 6.8 MB, 6.9 MB, 7.0 MB, 7.1 MB, 7.2 MB, 7.3 MB, 7.4 MB, 7.5 MB, 7.6 MB, 7.7 MB, 7.8 MB, 7.9 MB, 8.0 MB, 8.1 MB, 8.2 MB, 8.3 MB, 8.4 MB, 8.5 MB, 8.6 MB, 8.7 MB, 8.8 MB, 8.9 MB, 9.0 MB, 9.1 MB, 9.2 MB, 9.3 MB, 9.4 MB, 9.5 MB, 9.6 MB, 9.7 MB, 9.8 MB, 9.9 MB, 10.0 MB, in length, or a number or range between any two of these values. In some embodiments, the expanded genomes can be can be, can be at least, or can be at least about 3.0 MB, 3.1 MB, 3.2 MB, 3.3 MB, 3.4 MB, 3.5 MB, 3.6 MB, 3.7 MB, 3.8 MB, 3.9 MB, 4.0 MB, 4.1 MB, 4.2 MB, 4.3 MB, 4.4 MB, 4.5 MB, 4.6 MB, 4.7 MB, 4.8 MB, 4.9 MB, 5.0 MB, 5.1 MB, 5.2 MB, 5.3 MB, 5.4 MB, 5.5 MB, 5.6 MB, 5.7 MB, 5.8 MB, 5.9 MB, 6.0 MB, 6.1 MB, 6.2 MB, 6.3 MB, 6.4 MB, 6.5 MB, 6.6 MB, 6.7 MB, 6.8 MB, 6.9 MB, 7.0 MB, 7.1 MB, 7.2 MB, 7.3 MB, 7.4 MB, 7.5 MB, 7.6 MB, 7.7 MB, 7.8 MB, 7.9 MB, 8.0 MB, 8.1 MB, 8.2 MB, 8.3 MB, 8.4 MB, 8.5 MB, 8.6 MB, 8.7 MB, 8.8 MB, 8.9 MB, 9.0 MB, 9.1 MB, 9.2 MB, 9.3 MB, 9.4 MB, 9.5 MB, 9.6 MB, 9.7 MB, 9.8 MB, 9.9 MB, 10.0 MB, or longer, in length, or a number or range between any two of these values.

### Kits

[0177] Disclosed herein include kits comprising a system or nucleic acid composition described herein, and a set of instructions for use. For example, the kit can comprise a nucleic acid composition comprising one or more polynucleotides of the disclosure (e.g., the first, second, third, and/or fourth helper polynucleotides).

[0178] In addition to above-mentioned components, a kit can further include instructions for using the components of the kit to practice the methods. The instructions for practicing the methods are generally recorded on a suitable recording medium. For example, the instructions may be printed on a substrate, such as paper or plastic, etc. As such, the instructions may be present in the kits as a package insert, in the labeling of the container of the kit or components thereof (i.e., associated with the packaging or subpackaging) etc. In other embodiments, the instructions are present as an electronic storage data file present on a suitable computer readable storage medium, e.g. CD-ROM, diskette, flash drive, etc. In yet other embodiments, the actual instructions are not present in the kit, but means for obtaining the instructions from a remote source, e.g. via the internet, are provided. An example of this embodiment is a kit that includes a web address where the instructions can be viewed and/or from which the instructions can be downloaded. As with the instructions, this means for obtaining the instructions is recorded on a suitable substrate.

### EXAMPLES

[0179] Some aspects of the embodiments discussed above are disclosed in further detail in the following examples, which are not in any way intended to limit the scope of the present disclosure.

### Example 1

### Creation of Genomic Chimeras Via Megabase Scale Genome Expansion

[0180] To address the need for new technologies specifically enabling programmable megabase scale genomic recombination-independent integration, e.g., in a single step, there is described in this Example Additive Conjugative-CAST Engineering (ACE). ACE combines conjugation from a non-self-propagating broad host range RP4 plasmid with targeted transposition from Type I-F Tn6677 CRISPR-associated transposition (CAST) from Vibrio cholerae HE-45 to precisely transfer and insert defined donor genomic fragments into the recipient's genome in a programmable manner. CAST has been previously demonstrated to perform CRISPR RNA (crRNA) dependent DNA transposition of up to 10-kb into target genomic loci and function in a variety of bacterial species. Inspired by its programmability and versatility, it is described herein that CASTs, as a component of ACE, can perform efficient, precise, and robust DNA integrations ranging from 100-kb to 2-mb per step into the E. coli genome, and genome expansions of at least ˜3-mb possible in two consecutive ACE steps. ACE is demonstrated herein as a tool for interrogating the genome architecture and the transcriptomic landscape of these chimeric E. coli cells with massive complementation of their DNA genome. Going beyond constructing merodiploid E. coli strains, the diversity and range of bacterial genomic material transferred by ACE was expanded by developing OASIS (Orthogonal ACE Sequential Integration System), leveraging the diversity of orthogonal Type I-F CASTs to rapidly construct non-enterobacterial ACE donors. With ACE and OASIS, there is showcased transfer of large >500-kb genome fragments from Pseudomonas into E. coli and begin multi-omic evaluations of select genome chimeras of increasing phylogenetic distance. Design, validation, and characterization of ACE

[0181] In the ACE system, the engineered bacterial conjugation and CAST components (FIG. 1A-FIG. 1B) are incorporated within four modular parts: Cassette^{START} Cassette^{STOP} pAra-Trans, and pAra-CAST. Cassette^{START} and Cassette^{STOP} each encode one origin of transfer (oriT) sequences from the RP4 conjugative plasmid and either the Right or Left transposon end (R-TE and L-TE respectively) sequences from the Tn6677 CAST system, together with corresponding negative and positive selection markers and green fluorescent protein (FIG. 1A). R-TE is placed downstream to the oriT in Cassette^{START} to mark the start of conjugation, while L-TE is placed upstream to the second oriT in Cassette^{STOP} to mark the end of conjugation. Together, Cassette^{START} and Cassette^{STOP} mark the precise start and the end of the transferred genomic fragment from the donor and retain the R-TE and L-TE sequences after the conjugation into the recipient cell to guide the genomic integration. Plasmid pAra-Trans holds the components of a minimized conjugation system to facilitate DNA conjugation from the donor cell (FIG. 1A). Plasmid pAra-CAST encodes the rest of the CAST components, including the crRNA dictating the location of genomic integration in the recipient cell (FIG. 1A).

[0182] The donor cell is defined starting with the consecutive integrations of Cassette^{START} and Cassette^{STOP} to define the boundaries of conjugation (FIG. 1B, panel ii) and completed with the introduction of the pAra-Trans (FIG. 1, panel iii). The recipient cell is defined with the introduction of pAra-CAST with a specific crRNA (FIG. 1B, panel iv). Upon induction of pAra-Trans, donor DNA is conjugated from Cassette^{START} to Cassette^{STOP} into the recipient cell (FIG. 1B, panel v). This conjugated DNA transiently circularizes in the recipient cell (FIG. 1B, panel vi) before it is subsequently integrated in a CAST and crRNA dependent manner, facilitated by the R-TE and L-TE sequences just within the boundaries of the transferred DNA (FIG. 1i, panel vii). Selection of the gain and loss of defined antibiotic markers enables selection for the desired transfer starting at Cassette^{START} and terminating at Cassette^{STOP} Alternative transfer starting at Cassette^{STOP} and terminating at Cassette^{START} is theoretically possible but is selected against and does not yield a viable intermediate for subsequent integration with the correctly positioned R-TE and L-TE. CASTs have been described to carry out bidirectional transposition, leading to two possible integration orientations, right-to-left (R-L) and left-to-right (L-R) orientations (FIG. 1, panel vii).

[0183] We first validated ACE to transfer short, synthetic donor sequences up to 100 kb. To minimize any potential interference by homologous recombination, we first constructed the E. coli DH10B-Syn100ΔlacZ strain as the donor strain which harbors a 100-kb synthetic DNA sequence Syn100 bearing no homology to E. coli genomic sequence (FIG. 2A). ACE was accomplished with three distinct lengths of Syn100 (10 kb, 50 kb and 100 kb) transferred from the donor to one of three target sites (TS1, TS2|TS^{lux} and TS3) into the recipient E. coli DH10B (Δdif::lux) strain (FIG. 2A-FIG. 2B). TS1 and TS3 were arbitrarily chosen on opposing sides relative to the position of the origin of replication (oriC), while TS2|TS^{lux} (referred from now on as TS2) was situated to target a luxABCDE luminesence operon replacing the original dif site (Δdif::lux) in the terminus region of the chromosome. Integrations at TS2 lead to loss of chemiluminescence in this recipient strain as it knocks out the luxA gene in the lux operon.

[0184] ACE transfers of the Syn100 are stable, specific, and efficient. With the presence of corresponding crRNAs (crRNA^{TS1}, crRNA^{TS2}, crRNA^{TS3}) integration efficiencies at all target sites were high, ranging from 10⁶ to 10⁸ GFP+c.f.u. per experiment for all sizes transferred (FIG. 2C). With non-targeting crRNA (crRNANT) or absence of the crRNA (ΔcrRNA), the c.f.u. was dramatically reduced by several magnitudes to 103 to 105, and further reduced to almost zero in the absence of CAST components (ΔCAST) (FIG. 2C). To demonstrate the precision of ACE, an in vivo screen was performed leveraging concomitant loss of recipient chemiluminescence with gain of donor cargo fluorescence when integrating into the Δdif::lux at TS2 to assay for on-target transposition (FIG. 2D, FIG. 7A). For all transferred lengths, a >90% ACE on-target rate was observed, consistent with previous assessments of Tn6677 CAST specificity at shorter transfer size less than 10 kb. This assay was repeated with three additional lux-targeting crRNAs (crRNA^{luxA*}, crRNA^{luxB1} and crRNA^{luxB2}) with the 100-kb donor to control for variations caused by individual crRNA specificity (FIG. 2D). All measured on-target rates were consistently high. We further verified the success of ACE events and the stable presence of the imported Syn100 DNA at the correct target site by genotyping PCR of the junctions and multiple internally distributed segments across the length of Syn100. (FIG. 2E and FIG. 7B-FIG. 7D). The junction PCRs also uncovered an R-L integration bias for these donors for all target locations in agreement with previous characterizations of Tn6677 CAST system at shorter transfer size (FIG. 2E and FIG. 7B-FIG. 7D, FIG. 7F).

[0185] To both quantify the observed R-L/L-R bias and improve the resolution on the on-target ACE results, a tagmentation-based transposon-sequencing (Tn-Seq) protocol was developed for genome-wide interrogation of all on and off-target ACE events (FIG. 8A). Tn-Seq of Syn100 10-kb, 50-kb and 100-kb transfers into TS1, TS2 and TS3 reveal on-target rate ranging from 93.4% to 99.7%, consistent with our in vivo lux screen on TS2 (FIG. 2F, FIG. 2D and FIG. 8B and FIG. 8D). The data also corroborates the significant R-L integration bias for all lengths transferred and locations targeted (FIG. 2F and FIG. 8C). Each target had an integration distribution around the expected 49 bp insertion distance that remained constant over all tested donor sizes (FIG. 2G).

[0186] ACE efficiency and specificity necessitate the presence of both crRNA and CAST components. The ability for unbiased detection of transposition throughout the genome afforded by Tn-Seq motivated us to attempt Syn100 transfers with CAST variants containing deletions of key modules. Around a 10-fold decrease in efficiency was observed for Syn100 transfers using CAST-crRNA^{NT}, CAST-ΔcrRNA and CAST-Δcascade and nearly a 100-fold decrease in efficiency for transfers using CAST-ΔQcascade when compared to CAST-crRNA^{TS2} (FIG. 8E). Transfers employing CAST-Δtns or ΔCAST abrogated nearly all activity, demonstrating the importance of the tnsABC module for integration (FIG. 8E). Tn-Seq of these transfer experiments showed different patterns of genome-wide non-specific integrations (FIG. 8F-FIG. 8I).

### Demonstrating ACE at Mega-Base Scale and the Importance of Genome Architecture

[0187] The success of ACE motivated us to further scale up donor size to megabase-scale. The same E. coli DH10B (Δdif::lux) strain was used as the recipient with crRNA^{TS1}, crRNA^{TS2}, or crRNA^{TS3} defining the integration site at TS1, TS2, or TS3. The synthetic recoded E. coli Syn6l was chosen as the donor strain for its ˜18,000 SNPs in the form of recoding and refactoring of genes throughout its genome, enabling us to reliably differentiate between the incoming donor segment and the recipient genome upon whole genome sequencing. Syn61 donors were constructed for transfer of 100-kb, 600-kb and 1-Mb genomic DNA with Cassette^{START} and Cassette^{STOP} spaced roughly equidistant from the terminus region (FIG. 9A). Three different donor sequences together with three different integration sites into the recipient genomes can yield nine possible chimeric genomes (FIG. 9B). 10⁵-10⁷ GFP+c.f.u. was observed for transfers of the 100-kb donor segment into various parts of the genome. The efficiencies dropped to 10²-10³ GFP+c.f.u. for transfers of the 600-kb and 1-Mb donor segments (FIG. 9C). As with the Syn100 donor transfers, crRNA^{NT} or ΔcrRNA controls showed a 10² to 10³-fold decrease in GFP+c.f.u., suggesting a low off-target rate. At all lengths, ΔCAST controls produced close to zero GFP+c.f.u. (FIG. 9C). Notably, comparable methods of achieving large genome additions by recombination fail to attain the efficiency and specificity of ACE, especially for larger megabase-sized insertions (FIG. 10A-FIG. 10C). Observed genome-wide on-target rates were consistently high for ACE at megabase scale as measured by both in vivo chemiluminescence screen at TS2 (FIG. 9D) and Tn-Seq at all three target positions (FIG. 9E).

[0188] R-L integration bias was again observed for all lengths and locations transferred, except in the unique exception of 100-kb donor segment into recipient genome position TS1, which had a predominantly flipped L-R integration bias (FIG. 9E). Examination of the 100-kb donor segment reveals the presence of a single ter site, terC. Ter sequences situate throughout the terminus region of the E. coli genome and have been implicated in the termination of genome replication by forming unidirectional replication fork traps when bound by the protein tus (FIG. 10D). Consistent with the required orientation of the ter sites, we realized that L-R integration of the 100-kb donor in TS1 orients the terC in that segment in alignment with the required DNA replication directionality, suggesting that R-L integration would lead to replication fork arrest at the non-permissive end of the inverted terC (FIG. 10E). This deviation from R-L integration bias for this condition was also accompanied by a different integration distribution centered around 44 bp (FIG. 9F). Otherwise, all other conditions had expected distributions in agreement with previous Syn100 measurements (FIG. 9F, in comparison to FIG. 2G).

[0189] Successful ACE events are necessary but may not be sufficient for long-term stability of the fused chimeric genome. The stability of post-ACE clones was verified with next generation sequencing. Whole genome sequencing showcased the presence and integrity of the entire transferred segment in the correct location for 100-kb, 600-kb and 1-Mb Syn61 donor segments when integrated into the recipient's TS2 position (FIG. 9G and FIG. 10E, FIG. 11A-FIG. 11B). The 100-kb donor segment was also stable in the recipient's TS1 and TS3 genomic positions with the requirement of a properly oriented terC site. In contrast, the 600-kb and 1-Mb donor segments, centering the terminus region of the donor genome and both containing multiple ter sites facing opposite directions, were not maintained in the recipient genome upon integration into TS1 or TS3 positions (FIG. 10E and FIG. 11A-FIG. 11B). As in the case of R-L 100-kb TS1 integration, this observation is consistent with the hypothesis that integration of 600-kb and 1-Mb donor segments in either orientation presents the post-ACE chimeric chromosome with numerous opposing ter sites orientated towards their non-permissive directions, trapping the advance of the replisome during normal chromosome replication (FIG. 11A-FIG. 11B). We thus noted the important distinction between on-target ACE integration and stable post-ACE maintenance of the donor DNA. While the Tn-Seq data shows that the transfers are generally on-target in all conditions, we infer, without being bound by any particular theory, that a majority, if not all, of those on-target integrations of donated segments with non-permissive architectures involve the subsequent loss of the whole or part of the internal donor segments possibly due to genomic instability from premature replication fork trapping.

[0190] The SNPs distributed in the coding sequences of the incoming Syn61 donor were utilized to differentiate its recoded genes from their wild-type DH10B homologs. Through this variant calling analysis, the identity of successfully integrated and stably maintained donor segments of 100-kb, 600-kb and 1-Mb Syn61 genomic segments at the recipient DH10B's TS2 target was confirmed, revealing general parity between the frequency of the wild-type DH10B genes and their recoded Syn61 homologs, each at their expected locations within the chimeric genome (FIG. 9G and FIG. 10E, FIG. 11A-FIG. 11B).

### ACE at Multi-Megabase Scale and Modularity Across the Entire Donor Genome

[0191] We next systematically explored the possibility of mobilizing DNA from all regions of the donor genome. To enable this, multiple Syn61 donors were engineered that each would mobilize a very large discrete segment of their synthetic genomes in an ACE event.

[0192] To push the limits of ACE, the first donor segment (seg. 1) spans 2-Mb, or half of its genome, centering around the dif terminus region (FIG. 3I). Donor seg. 2 covers 1-Mb segment downstream from the oriC, and seg. 4 and 5 covers two contiguous 500-kb segments upstream of oriC (FIG. 3A, FIG. 3C, FIG. 3G). An additional 1-Mb donor segment seg. 3 is defined spanning across oriC (FIG. 3E). Segments seg. 2, 3, 4 and 5 do not contain any primary ter sequences. Together, these donor segments span the entirety of the 4-Mb donor genome.

[0193] The integration of the 2-Mb seg. 1 donor segment into the recipient's TS2 genomic position would constitute an almost 50% expansion of the E. coli genome. Amazingly, this chimeric genome was characterized to be successful and stable via whole genome sequencing, (FIG. 3J). Efforts to integrate the same 2-Mb seg. 1 into the TS1 and TS3 sites failed to yield stable clones (data not shown). Without being bound by any particular theory, this may be due to the same forbidden genomic architecture with opposing directions of ter sites previously described.

[0194] We tested the transfer of remaining distinct donor segments into recipient DH10B Δdif::lux genome at TS1, TS2 or TS3 positions (FIG. 3A-FIG. 3H and FIG. 12A). The 1-Mb seg. 2 can be stably integrated into all three sites in the recipient's genome (FIG. 3H, FIG. 12A-FIG. 12B). Moreover, the two separate 500-kb segments seg.4 and seg. 5 yielded stable post-ACE clones into all three sites in the recipient's genome (FIG. 3B, FIG. 3D and FIG. 12A, FIG. 12C-FIG. 12D). While it has been suggested that maintaining symmetry between the replichores is important for bacterial genome stability, our observations suggest, without being bound by any particular theory, that the bacterial genome is robust to at least tolerate large megabase-scale insertions at various positions on the chromosome, provided the absence of misaligned ter sites relative to the direction of the replichore.

[0195] Additionally, described herein is the successful transfer of the 1-Mb seg. 5 centered around the oriC of Syn61 into TS3 of a DH10B recipient. This procedure generated genome chimeras that have an additional, ectopic replication origin. Whole genome sequencing indicates that this inserted secondary oriC is active, due the presence of a maxima of read coverage at this oriC (FIG. 3F).

[0196] Collectively taken, it shown herein that the entirety of a bacterial genome can be transferred in discrete sections into other bacteria to build genome chimeras.

### Transcriptomics of Chimeric Genomes Fused by ACE

[0197] The creation of a 4.6-Mb E. coli DH10B+2-Mb Syn61 genome chimera presents a unique opportunity to investigate its transcriptomic profile. This first-in-class artificial bacterial strain has nearly half of its gene content complemented by recoded homologs (FIG. 3K). This will allow us to understand whether these recoded homologs express and how their presence influences native genomic context.

[0198] RNA-Seq measurements were performed on said chimeric genome alongside donor and recipient controls. An initial inspection of the data suggests that imported recoded complements and their native homologs are both transcriptionally active when comparing individual replicates through hierarchical clustering and grouped datasets through positional expression (FIG. 3L-FIG. 3M). A comparison of the expression distribution for both the DH10B genes and Syn61 genes uncovers no significant difference between the levels of expression for Syn6l and DH10B gene homolog categories (FIG. 3N). Differential expression of the chimeric genome compared to the DH10B background reveals an overexpression bias of at least 1-fold change for a subset of genes that were duplicated and made redundant via ACE (FIG. 3O). Nonetheless, the strength of expression changes observed in our data are not solely determined by the copy number of genes, and deeper exploration is required to understand the regulatory dynamics of chimeric genomes constructed via ACE. We can consequently conclude that the massive complementation of the DH10B genome with recoded genes from Syn6l leads to expression of the introduced genes and perturbation of the native genomic background.

### Cross-Genus Megabase Genomic Additions

[0199] It was next investigated whether ACE was generalizable to donor and recipient bacteria beyond E. coli strains for the creation of cross-genus genome chimeras. Towards this aim, we engineered an attenuated Shigella flexneri strain (S. flexneri CFS100) into a donor to donate about 1 Mb of its genome. S. flexneri was chosen as Shigella is classified as the genus closest related to the genus of E. coli (FIG. 5A). In a single ACE step, the engineered S. flexneri donor strain successfully transferred 900-kb of its genome centered around the dif into the dif site of an E. coli DH10B recipient (FIG. 4A). The success and stability of this cross-genus chimeric genome was validated by whole genome sequencing (FIG. 4B). A corresponding transfer of the S. flexneri donor using a different E. coli strain MDS42 dif was also performed and confirmed to have been successful (FIG. 4A-FIG. 4B).

[0200] RNA expression profiles of both the DH10B-Shigella and the MDS42-Shigella ACE chimeras were interrogated in this work. Similar to our observations for the DH10B-Syn61 ACE chimera, DH10B- and MDS42-Shigella ACE chimeras showcase robust transcriptional expression for both imported gene homologs and their native complements (FIG. 4C-FIG. 4D, FIG. 14A). Novel Shigella genes that were gained through ACE expressed readily in both DH10B and MDS42 recipient backgrounds (FIG. 4F). Expression of genes originally deleted in the MDS42 strain background were reconstituted upon chimerization via ACE (FIG. 4E). Differential expression analysis was additionally carried our for the DH10B- and MDS42-Shigella ACE chimeras compared against DH10B background. This revealed a strong bias of at least 1-fold change for genes that were duplicated and made redundant via ACE (FIG. 14B). Of note, gene ontology analysis of the intersection of overexpressed genes in the DH10B- and MDS42-Shigella ACE chimera showcased strong upregulation of genes involved in iron-sulfur complex assembly, glyoxylate bypass, peroxidase, and flagellar assembly (FIG. 14C-FIG. 14D).

### Iteration of Megabase Transfers: Creation of a Genomic Trimera

[0201] We further demonstrated the iteration of ACE to enable even larger scale sequential additions. The ability to iteratively transfer multiple megabases from different donor bacteria would significantly expand the number and complexity of artificial genome chimeras attainable through this method. It was therefore asked whether multiple large insertions with ACE are possible on the same recipient.

[0202] Towards this end, we decided to test the iterative integration of the 900-kb S. flexneri donor segment into the previously validated E. coli DH10B+2-Mb Syn61 seg. 1 chimeric strain (FIG. 4G). Anticipating this, we had previously flanked the +2/−2 GFP selection/screening cassette adjacent to the L-TE in the Cassette^{STOP} with recombinase sites of the PhiC31 integrase. Expression of the integrase successfully excised the +2/−2 markers in addition to the GFP from the genome of E. coli DH10B+2-Mb Syn61 seg. 1, priming this chimeric strain for subsequent megabase-scale ACE transfer (FIG. 13A-FIG. 13B). It was reasoned that we would not encounter the phenomenon of Tn7-like transposon target immunity if we integrated the S. flexneri donor into the middle of the 2-Mb Syn61 segment of the chimera using the dif crRNA. The R-TE and L-TE of the newly integrated donor would be approximately 1 Mb from both the R-TE and L-TE of the previous integration, thus avoiding a reduction of transposition efficiency. The sequential integration of a 1-Mb S. flexneri donor segment into the dif site of the Syn61-DH10B chimeric genome yielded stable trimeric genomes (FIG. 4I and FIG. 13C-FIG. 13D).

[0203] This stable trimeric genome was then interrogated in the context of RNA transcriptomics, and all three homolog gene variants were shown to be expressed robustly (FIG. 4J). Interestingly, the RNA count distribution highlights an order of preference for the strength of expression of the homolog variants, where DH10B native variants are expressed more than Syn61 homolog variants, and where Syn61 homolog variants are expressed more than Shigella variants. Differential expression was carried out comparing the trimeric strain to the DH10B background; our findings suggest that—alike previous ACE chimeric strains—there is a non-deterministic enrichment in gene overexpression above 1-fold for both doubly redundant and triply redundant genes (FIG. 4K).

[0204] Confocal microscopy of these chimeric and trimeric strains revealed rod-shaped morphologies akin to their wild-type bacterial progenitors (FIG. 4H). Growth assays of these strains also revealed that larger and successive transfers slow the growth rate of these strains to a moderate extent (FIG. 13E-FIG. 13F). Long-term stability of chimeric genomes was also demonstrated through prolonged passaging in different standard media and growth conditions exceeding 100 generations (FIG. 13G). Taken together, it is provided herein the successful creation of a cross-strain cross-genus genome trimera with a remarkably expanded genome of ˜7.5 Mb, a ˜3 Mb addition of genetic information in two successive ACE steps.

### Cross-Class and Cross-Order Genome Chimeras

[0205] ACE was also tested across more distantly related bacteria. ACE transfers into industrially and biotechnology relevant bacteria such as Agrobacterium tumefaciens, Vibrio natriegens and Pseudomonas putida were tested. Compared to S. flexneri, these strains are more phylogenetically distant to E. coli and are classified in distinct orders (FIG. 5A). First, sub-megabase scale transfers from E. coli Syn61 to A. tumefaciens was demonstrated (FIG. 5B and FIG. 15A). Remarkably, these chimeric Agrobacterium were shown to be viable for agroinfiltration of Nicotiana benthamiana leaves, capable of transferring the YFP embedded in the Syn61 cargo from its genome in a T-DNA dependent manner (FIG. 15B-FIG. 15C). Next, with Vibrio natriegens we were able to achieve transfers of a 1-Mb MDS42 donor segment centered around the dif into both the dif site of chromosome 1 and of chromosome 2 in V. natriegens (FIG. 5C-FIG. 5D). However, although being viable and stable from room temperature to 37° C., these chimeric strains suffered decreased fitness at 4° C. and were not culturable after long term cryogenic storage, consistent with previous reports of the susceptibility V natriegens to cold temperatures. Nevertheless, we were able to conduct transcriptomic expression analysis, demonstrating expression of the E. coli genes gained through this transfer in the chimera and uncovering upregulation and downregulation of various Vibrio genes in the chimera relative to the background strain (FIG. 5E and FIG. 14E-FIG. 14J). Pilot transfers of 100-kb Syn100 were also successful from E. coli donor into P. putida recipient when targeting downstream of the glmS gene (FIG. 15D-FIG. 15E). In summary, demonstrated herein is proof of concept ACE transfers of large donors across diverse bacteria spanning different species, genus, orders and even class, providing first-in-class evidence towards the functional expression of megabase-scale cross-species genomic hybrids.

### Attenuation of Pathogenic Properties and Emergence of Novel Metabolites in Pseudomonas Chimeras

[0206] The use of orthogonal CASTs to insert Cassette^{START} and Cassette^{STOP} in bacteria that are much less amenable to recombination of heterologous DNA serves as the foundation of the OASIS method to construct donors, which unlocks the use of P. protegens pf-5 as a donor for ACE. A panel of P. protegens donors were then rapidly constructed, ranging from 140-, 246-, 395-, 415- and 522-kb, that were successfully transferred into E. coli DH10B at a wide range of loci (FIG. 5F-FIG. 5I and FIG. 16A, FIG. 16G, and FIG. 16H). Several chimeras from this panel were selected for downstream functional and omics experiments. Firstly, given the presence of hemolytic genes shlA and shlB in the 522-kb segment, we set out to assay the hemolysis activity of the chimeras relative to the donor and recipient. It was determined that the chimeras exhibit no hemolytic activity, in contrast with P. protegens, providing the use of ACE as a method for attenuating pathogenic phenotypes through chimerization (FIG. 6A). Next, unbiased metabolomic profiling of the 140-kb and 415-kb chimeras was performed (FIG. 6B-FIG. 6F and FIG. 16B-FIG. 16F). Notably, for the 415-kb chimeras, we uncovered a preponderance of unique m/z peaks that are not present in either the donor P. protegens or the recipient E. coli, suggesting the emergence of novel metabolic signatures through the process of chimerization (FIG. 6B-FIG. 6E). Indeed, PCA of the metabolomic profiles of the chimeras relative to the donor and recipient uncovers discrete clustering of the chimeras away from the donor and recipient profiles (FIG. 16F). Finally, we attained through iterative ACE of 522-kb and 415-kb chimeric segments of P. protegens into E. coli DH10B a near 1-Mb consolidation of P. protegens DNA stably inserted into the E. coli genome (FIG. 6G-FIG. 6H).

### Discussion

[0207] ACE enables multi-megabase genome integrations to create synthetic bacterial chimeras in a single step. Moreover, iterations of ACE can create trimeric strains larger than any prior reports. These created GEOs were stable and transcriptionally active. ACE functions across strains, species, genus, and orders, illustrating the feasibility of rapid, robust and scalable construction of artificial life.

[0208] The specificity and efficiency of ACE depends on the unique design coupling the oriT and TE sequences to specify the transfer window and facilitate the crRNA guided integration. Initiation of conjugation at the first starting oriT in Cassette^{START} and termination of conjugation at the second ending oriT in Cassette^{STOP} enables tight regulation of what is transferred and integrated to the recipient, and subsequently the oriT-adjacent TEs are used for targeted insertion.

[0209] Without being bound by any particular theory, this double-oriT configuration leads to two possible stretches of transferred DNA, hence the specific positions of the R-TE/L-TE and introduction of markers to counter-select against the undesired product starting from Cassette^{TO} and ending at Cassette^{START}. While this is effective for substrates of lengths equal to or less than half the size of the donor genome, in some embodiments, this double-oriT approach may reduce the efficiency of transfer for substrates larger than half the size of the donor genome. Engineering the conjugation machinery and the oriT sequences may pave the way to higher efficiency and greater robustness especially for greater than 1%-genome ACE operations.

[0210] The ACE design is also conducive to biocontainment as it decouples conjugation of the donor genomic fragment and integration of the transferred fragment into two separate plasmids in two cellular compartments. The donor DNA does not encode the means of its propagation after the conjugation into another cell without pAra-Trans. Only the designated recipients that carry the pAra-CAST will be able to incorporate the donated DNA, otherwise the transferred DNA cannot replicate and maintain itself. Hence, ACE has been inherently structured to limit the inadvertent propagation of transferred DNA outside of its intended target.

[0211] ACE demonstrates the capacity of CAST on the multi-megabase scale. By incorporating type I-F CAST as part of the disclosed ACE system, its targeted genomic integration capacity was expanded from 10-kb all the way to 2-Mb, ˜200-fold greater than previously reported. Without being bound by any particular theory, the findings reveal that the multi-stage recruitment of the cascade-tniQ-tnsC-transposome complex in the type I-F CAST, shown to mediate licensing of accurate target site selection and transposition, remains functional even in the context of genome-scale donors.

[0212] ACE offers a powerful alternative to homologous recombination-based methods. Genome integration by ACE via CAST inherently bypasses the need for double strand breaks (DSBs) and homologous recombination (HR) for incorporating changes into a chromosome. By building cross-strain genomes via ACE, we largely minimized genomic instability and undesired random recombination events, the occurrence of which is typically elevated when using HR and DSB dependent techniques to transfer megabase-sized DNA containing long redundant stretches homologous to the recipient genome.

[0213] While specific, CAST mediated transposition is also programmable. The reported flexibility in PAM requirements of Type I-F CASTs enables use of crRNAs with non-canonical PAMs. Indeed, in the studies described herein, we deviated in certain occasions from the 5′-CC-3′ PAM requirement, such as using a 5′-CA-3′ PAM when targeting the dif site, without noticeable reductions in ACE efficiency. Portability of Type I-F CASTs, as demonstrated in human cells, may also enable translation of ACE into higher eukaryotes, despite the challenge of megabase DNA cargo delivery. We are nonetheless curious of the possibilities of translating this technology into more complex biological systems for engineering synthetic eukaryotic genomes.

[0214] ACE can also be configured to use other types of CASTs. Although a Type I-F multi-subunit effector CAST for ACE was chosen here, single-effector CASTs, such as those of the Type V-K system, may, in some embodiments, replace the Type I-F system as the integration module in this protocol. Experiments using Cas12k-TniQ-TnsBC in a similar conjugative workflow have been conducted using Cas12k coupled transposases to successfully transfer Syn100 but chose to continue with the Type I-F system on account of its greater integration fidelity and absence of co-integrate formation (data not shown). However, numerous advances in engineering target selection and eliminating co-integrate products of Type V-K CASTs may elevate conjugation coupled Type V-K transposition as a suitable alternative to Type I-F CAST in ACE.

[0215] With its numerous benefits, ACE offers improved alternatives to all steps of the current genome synthesis paradigm. Artificial genomes with designated properties may not need to be designed from scratch and then painstakingly synthesized and assembled, but rather melded together from diverse natural genomes in a single ACE or an iteration of several ACE steps. Moreover, in contrast to the low efficiencies of in vitro delivery of 100-kb or larger synthetic DNA, megabases of DNA can be transferred between bacteria via conjugation in a single ACE step. Finally, ACE is the first reported use of CASTs for building synthetic genomes, enabling stable addition and maintenance of megabases of highly homologous genomic segments.

[0216] ACE has immediate applications for exploring microbial genome architecture through programmed large genomic transfers. Large genomic transfers with ACE reveals patterns in genome architecture. Integration experiments of segments centered around the dif and adjacent to the oriC into targets around the recipient E. coli genome enabled us to uncover the role of length and identity of the donor fragment in determining permissive transfer sites. We observed that donor segments centered around the dif and containing ter sites can be integrated but were unstable in target regions where the ter sites have their non-permissive ends orientated towards the oriC. Without being bound by any particular theory, we hypothesize that these ectopic ter sites prematurely arrest replication forks before they can reach the natural replication fork trap region of the genome opposite of the oriC, leading to incomplete genome replication, chromosomal instability, and subsequent rearrangement. Moreover, donors chosen adjacent to the oriC lacking ter sequences were largely stably integrated throughout the genome, although at variable rates, but nonetheless suggest a tolerance of the E. coli chromosome for large replichore asymmetries. Elucidating more precise rules beyond ter sites and their underlying mechanisms governing allowed and disallowed donors and insertion site pairings beyond preliminary observations will require the ability to perform systematic, high-throughput integration screens between many variant donor and recipient libraries in future studies. The ability of ACE to test the plasticity and requirement in the positional organization of information on the architectural genome provides a unique opportunity to comprehend, probe and reverse engineer the genomic underpinnings of life.

[0217] By encoding complex engineered functions into GEOs, ACE can spawn applications where these large truly genomic scale insertions can confer novel phenotypes and physiology for therapeutic and industrial applications. For example, ACE allows for transfers of large biosynthetic gene clusters into a variety of heterologous hosts for cluster expression, characterization, and refactoring for metabolic engineering. Beyond transferring natural DNA, ACE can also transfer synthetic DNA, interfacing with a plethora of in vitro and in vivo DNA assembly techniques. The ability to integrate large de novo designed and assembled DNA, combined with downstream transcriptomic, proteomic and physiological characterization can accelerate exploration of synthetic genome-scale modules for encoding desired functionalities. This may lead to the use of large language model guided design of GEOs for bespoke functions and applications.

[0218] ACE, and iterations of ACE, can integrate multi-megabase scale DNA across arbitrarily chosen donors and recipients to create artificial chimeric genomes. It is demonstrated herein that genomes of GEOs can be stable and can express the fused genomic pieces from multiple distinct parental species. With this novel ability, we echo the question first raised in Greek mythology: would it be possible to piece together a “chimeric” lifeform combining different biological traits across species, genus, or even order segregations? Robust and systematic generation of such “chimera” organisms would provide valuable insights on how a rationally designed synthetic chimeric genome directs the physiology and behavior of the underlying hybrid lifeform. Importantly, these techniques can lay the foundation of a new paradigm of artificial lifeforms to enable novel functions and future applications beyond the available designs of nature.

### Methods

### General Methods

[0219] DNA amplification was performed using PrimeSTAR™ GXL DNA Polymerase (TaKaRa Bio USA cat #R050) or Q5® High-Fidelity 2× Master Mix (New England BioLabs (NEB) cat #M0492) unless otherwise stated. DNA oligonucleotides were obtained from Integrated DNA Technologies (IDT) and Millipore Sigma. Gene fragments (gBlocks) were obtained from IDT or Twist Biosciences. Nucleic acid purification and cleanup was done with QIAquick® PCR Purification Kit (QIAGEN™ cat #28106). DNA extraction from agarose gels was conducted with GeneJET Gel Extraction Kit (Thermo Scientific™ cat #K0691). All plasmids were assembled using Gibson assembly using NEBuilder® 2× HiFi Assembly mix (NEB cat #E2621) or Golden Gate assembly using NEBridge® 3× Ligase Master mix (NEB cat #M1100) and BsaI-HF© v2 (NEB cat #R3733). Standard plasmid DNA cloning was performed using electrocompetent E. coli DH10B, which was made electrocompetent as previously described. Plasmid DNA extraction from E. coli DH10B was done with QIAprep© Spin Miniprep Kit (QIAGEN™ cat #27106). All antibiotic and counter-selection concentrations when used are as follows: 100 μg/mL streptomycin, 200 μg/mL hygromycin, 2.5 mM 4-chlorophenylalanine, 25 g/mL chloramphenicol, 7.5% w/v sucrose, 50 μg/mL spectinomycin, 75 μg/mL apramycin, 50 g/mL kanamycin, 100 μg/mL carbenicillin, 10 μg/mL tetracycline and 20 μg/mL gentamicin.

### Bacteria Culturing Conditions

[0220] All E. coli and S. flexneri bacterial strains were grown at 37° C. in selective Lysogeny Broth (LB) with shaking unless otherwise stated. Individual colonies were grown overnight on selective LB-agar plates at 37° C. prior to liquid growth. All P. putida, P. protegens and A. tumefaciens bacterial strains were grown at 30° C. in LB with shaking or on solid LB-agar plates. For overnight culturing, V. natriegens bacterial strains were grown at 30° C. in LBv2 for liquid growth or on LB-agar plates for solid growth. For daytime culturing for electrocompetency, V. natriegens was grown at 37° C. in LBv2. V natriegens electrocompetency was performed according to methods known in the art. Antibiotic concentrations were modified when selecting against P. protegens with hygromycin (500 μg/mL) and tetracycline (30 μg/mL) and when selecting against S. flexneri with spectinomycin (100 μg/mL).

[0221] Detailed documentation of all bacteria strains and their derivatives used in this study are listed in Table 2A-Table 2D. Briefly, E. coli DH10B rpsL K43R, E. coli DH10B rpsL K43R Δdif::lux, E. coli MDS42 rpsL K43R ΔrecA, Vibrio natriegens ATCC 14048 DSM759, Pseudomonas putida KT2440 and Agrobacterium tumefaciens GV3101 were used as base strains for the construction of ACE recipient strains. Donor strain construction was carried out in E. coli DH10B rpsL K43R Syn100, E. coli MDS42 rpsL K43R ΔrecA, E. coli MDS42 rpsL K43R ΔrecA Δtus, E. coli Syn61 rpsL K43R ΔpheS*-hygroR, Shigella flexneri CF S100 rpsL K43R ΔrecA Δtus ΔoriT ΔhigB Δhok and Pseudomonas protegens pf-5 backgrounds.

### Plasmid Construction

[0222] All plasmids and oligonucleotides used in their construction are listed in Table 3-Table 4D. Most plasmid constructs were constructed via Gibson assembly. In short, pAra-CAST was derived from pSL1777 (Addgene #160731) and variant constructs used for control experiments were subcloned from this starting plasmid. pAra-CAST variants under the RSF backbone were constructed for experiments carried out in V. natriegens and P. putida. pAra-CAST variants under the VS1 backbone were constructed for experiments carried out in A. tumefaciens. CAST variants with hygroR resistance gene were used for experiments involving P. protegens donors. The appropriate crRNAs were cloned into pAra-CAST acceptor plasmids using Golden Gate assembly using annealed DNA oligonucleotides.

[0223] The principal conjugation component used in this work (pAra-Trans) was derived from pBAD-traRP4 min and the commercial pBelo ori2 BAC. Plasmid templates for Cassette^{START} (pSC101-spectR-cassette1-sC-oriT-RE; pCassette^{START} for short) and Cassette^{STOP} (pSC101-spectR-cassette2-pHGFP-LE-oriT; pCassette^{STOP} for short) were cloned under a pSC101 backbone to facilitate propagation for downstream amplification and λ-red mediated recombination. pCassette^{START-RECM}, pCassette^{STOP-ECM} was subcloned from pCassette^{START} and pCassette^{STOP}, respectively. pSTART-RB^{T-DNA}-STOP-LB^{T-DNA} was subcloned from pCassette^{START}, pCassette^{STOP} and pGoldenBraid-p35S-TMV-2×YFP NLS-tHSP-KanR. For constructs pertaining to OASIS, pLac-OrthoCAST1 (Tn7007) was derived from pSL2361 and pCassette^{START}, while pLac-OrthoCAST2 (Tn7011) was derived from pSL2353 and pCassette^{STOP}. Likewise, pXyl-OrthoCAST1 (Tn7016) was derived from pSL2364 and pCassette^{START}, while pXyl-OrthoCAST2 (Tn7011) was also derived from pSL2353 and pCassette^{STOP}

Donor Strain Construction with Homologous Recombination

[0224] Classical λ-red mediated homologous recombination was also used to integrate Cassette^{START} and Cassette^{STOP} into the genome to generate donor strains. Briefly, pCassette^{START} was amplified with PCR using primer pairs bearing homology to the start and end of the transferred region and transformed into pre-induced electrocompetent cells of the relevant bacterial strain (see Table 4A-Table 4D for primer pairs used and Table 5 for Cassette homology sequences). Cells were plated on selective media and genotyped by PCR for cassette integration with the relevant primers in Table 4A-Table 4D. Colonies with the correct integration were sequenced. Cassette^{STOP} was integrated into colonies with sequence verified Cassette^{START} using the same procedure. Strains with both Cassettes integrated into their genome were made electrocompetent for transformation of pAra-Trans by electroporation as previously described to make finalized donor strains. Likewise, to generate recipient strains, base bacterial strains were made electrocompetent and transformed with pAra-CAST by electroporation to finalize recipient strains.

### Conjugative-Transposition Experiments (ACE)

[0225] All ACE events were performed at 30° C. based on past reports that CAST-directed transposition is more efficient at 30° C. than at 37° C.

[0226] For ACE transfer experiments between E. coli DH10B Syn100 or S. flexneri donor strains and E. coli DH10B, V. natriegens or P. putida recipient strains, donor and recipient cultures were inoculated into 10 mL of LB with appropriate antibiotics and 2% (w/v) glucose for overnight growth (12-16 hours). Overnight cultures were then pelleted by centrifugation and diluted into 100 mL of LB with the appropriate antibiotics at a starting OD₆₀₀ of 0.05. Cultures were grown at 37° C. to OD₆₀₀ of 0.10-0.20 before inducing with 0.5% (w/v) arabinose until cultures reach an OD₆₀₀ of 0.5. Cultures were then pelleted and resuspended in 400 μL of LB. Resuspended donors and recipients were then mixed in a 4:1 donor to recipient ratio (320 μL+80 μL) for a total of 400 μL and spotted in 13 μL aliquots onto a LB-agar plate with no antibiotics. Spots were dried under a flame before incubating at 30° C. for 4-8 hours to allow for conjugation coupled transposition activity. Spots were then washed from the plate using 5 mL of LB and added to a culture 95 mL of LB with the appropriate antibiotics and 0.5% (w/v) arabinose. Cultures were recovered at 37° C. for 3-6 hours before pelleting by centrifugation and then plating by serial dilution on selective LB-agar plates with appropriate antibiotics. Plates were incubated at 37° C. overnight for 12-16 hours, except for transfers into P. putida recipient, which were incubated at 30° C.

[0227] For ACE experiments involving E. coli Syn61 donors and for iterative ACE for trimera generation, an abridged ACE protocol that forgoes the growth to log phase was used. Donor and recipient cultures were inoculated into 10 mL of LB with appropriate antibiotics for overnight growth (12-16 hours). Overnight cultures were then pelleted by centrifugation and replenished with new 10 mL of LB with the appropriate antibiotics and 0.5% (w/v) arabinose and incubated at 37° C. for 2 hours. After induction, the remainder of this abbreviated ACE procedure is the same as described above. A comparison of the two described ACE methods is described below.

[0228] There are differences between the ACE protocol used in FIG. 2A-FIG. 2G and FIG. 4A-FIG. 4K and that which is used in FIG. 9A-FIG. 9G and FIG. 3A-FIG. 3O (also see above). While both versions of the protocol feature a solid agar conjugation step followed by a recovery and outgrowth step before selective plating, in FIG. 2A-FIG. 2G and FIG. 4A-FIG. 4K experiments were additionally performed with cultures grown to OD600 0.5 from a dilution of the overnight culture. However, this initial culturing contributed a significant amount of additional time to complete the entire protocol, limiting experimental throughput and necessitating the work of two researchers to sustainably complete one experiment. Moreover, the donor and recipient strains used in the experiments typically had different doubling times, so it was challenging to coordinate the growth of both cultures to the OD600 0.5 growth endpoint. By replacing this initial growth step with induction of the overnight culture in fresh media, the protocol time can be reduced by an average of three hours while also decreasing handling volumes, enabling higher experimental throughput and less burden on individual researchers to reasonably carry out megabase-scale ACE in a single day. This reasoning is what led to adoption of the modified protocol for FIG. 3A-FIG. 3O experiments.

[0229] On top of these practical experimental considerations, an increase in experimental efficiency (measured by GFP+c.f.u.) was also observed when carrying out the modified protocol compared to the new original protocol with 1-Mb Syn61 dif donor transfers with ACE. Without being bound by any particular theory, this may be due to larger populations of donor and recipient bacteria in the overnight culture compared to daytime culture. Little to no instability was observed when performing this protocol for generating DH10B+1-Mb Syn61 and DH10B+2-Mb Syn61 Syn-seg 1, leading to adoption of this protocol for experiments in both FIG. 9A-FIG. 9G and FIG. 3A-FIG. 3O (FIG. 4A-FIG. 4K experiments were already done with the original FIG. 2A-FIG. 2G protocol). Shortening or outright eliminating the post conjugation recovery and outgrowth step and directly plating the conjugation spots on selective media further reduced of protocol time and was done for some of the experiments of FIG. 7A-FIG. 16H.

[0230] For the ACE, conjugative recombination (CR) and conjugative Cas9-coupled recombination (CCR) comparison experiments, the abridged ACE protocol above was used. For 100 Kb ACE, CR and CCR transfers, donor and recipient conjugation spots were incubated for 4 hours at 30° C. with 3 hours of post-conjugation liquid culturing prior to plating on selective solid media. For 1 Mb and 2 Mb transfers, incubation of spots at 30° C. were for 6 hours and 8 hours, respectively, with 3 hours and 6 hours of post-conjugation outgrowth, respectively, prior to plating.

[0231] For ACE experiments with E. coli Syn100 donors and recipient E. coli DH10B pAra-CAST variants (FIG. 8E-FIG. 8I), E. coli MDS42 and Syn61 donors with A. tumefaciens GV3101 recipients, as well as P. protegens RK24 donors with E. coli DH10B recipients, the abridged ACE protocol was further shortened to eliminate the post-conjugation liquid culturing step. Donor and recipient cultures were inoculated into 10 mL of LB with appropriate antibiotics for overnight growth (12-16 hours). Overnight cultures induced as in the abbreviated ACE procedure above. After induction, cultures were pelleted and resuspended in 400 μL of LB. Resuspended donors and recipients were then mixed in a 4:1 donor to recipient ratio (100 μL+25 μL) for a total of 125 μL and four spots of 20 μL aliquots were made onto a LB-agar plate with no antibiotics. Spots were dried and incubated for 4 hours at 30° C. Spots were resuspended with 200 μL of LB for direct plating with serial dilutions on selective LB-agar plates. Plates were incubated as with conventional ACE. ACE transfers into Agrobacterium recipient were performed with conjugation spots incubated overnight and incubation of the final selective plates at 30° C.

[0232] For ACE experiments with P. protegens donors and E. coli DH10B recipients conducted with triparental mating, donor, recipient and conjugation helper strains were each inoculated into 10 mL of LB with appropriate antibiotics for overnight growth. The abridged ACE protocol without post-conjugation liquid culturing was used for the rest of the steps, with exception of conjugation spotting. Resuspended donor, recipient and helper strains were mixed in a ratio of 2:2:1 (200 μL+200 μL+50 μL) and 20 μL aliquots were spotted on LB-agar plates for 30° C. overnight incubation for triparental conjugation.

[0233] For generating stable clonal populations of GEOs for downstream analysis, colonies were picked from selective post-ACE plates and streaked out on fresh selective LB-agar plates for overnight incubation at 37° C. Colonies were picked from the streak-out plate and grown overnight in selective LB for long-term storage in 15% (v/v) glycerol at −80° C. A list of targets used in ACE experiments is given in Table 6A-Table 6B, a list of ACE experiments and selection schemes used is given in Table 7A-Table 7B and a list of ACE chimeric genomes (GEOs) made is given in Table 8. For GFP+c.f.u. ACE efficiency plots and in vivo ACE specificity screens, colonies of the correct phenotypes were counted on post-ACE plates.

### Phenotyping and Genotyping PCR Analysis

[0234] Single colonies of post-ACE were picked from selective LB-agar streak-out plates and resuspended in 40 μL of milli-Q H₂O. For colony phenotyping assays, 3-4 μL of the resuspension is spotted onto LB-agar plates with the target antibiotic. For colony genotyping PCR, reactions were performed with 2λ Red Taq Master Mix (Apex Bioresearch products cat #42-138) with 1 μL of the resuspension used as template per 20 μL of reaction volume, which contains 0.2 μM of each primer. Cycling protocol starts with 2 minutes of initial cell lysis and denaturation at 98° C. followed by 36 cycles of 95° C. denaturation, 60-65° C. primer annealing and 72° C. extension (at 1 kb/minute) with a final extension of 5 minutes at 72° C. For junction detection, primer pairs contained one donor-specific primer and one recipient-specific primer and were varied so that all integration orientation could be assayed for both the LE and RE transposon junctions. For internal region detection of the transferred sequence, primer pairs containing two donor-specific primers were used. PCR amplicons were resolved by 1% agarose gel electrophoresis using SYBR Safe staining for visualization.

[0235] All oligonucleotides used in analysis and validation of post-ACE bacteria are listed in Table 4A-Table 4D.

### Marker Excision for Iterative ACE

[0236] For +2/−2 and GFP marker excision for E. coli DH10B Δdif+2-Mb Syn61 Syn-seg. 1, the chimeric cells were made electrocompetent and transformed with pCS20 and plated on gentamicin selective LB-agar plates. Leaky expression of the PhiC31 recombinase enabled low levels of marker excision in the population, which was purified by streaking single colonies the next day on 4-chlorophenylalanine counter-selective plates. GFP-colonies were spotted on selective solid LB-agar containing hygromycin or counter-selection to verify the loss of markers. Excision of the markers were also assessed with genotyping colony PCR of the LE. Confirmed colonies were made electrocompetent and transformed with pAra-CAST-dif for downstream trimeric genome generation with iterative ACE.

Donor Strain Construction with OASIS

[0237] Competent E. coli DH10B pAra-Trans were electroporated with pLac-oCAST or pXyl-oCAST for inserting Cassette^{START} or Cassette^{STOP} in a specific genomic locus of the base strain to be engineered into an ACE donor. The E. coli oCAST integrator and base strain are grown in 10 mL of LB supplemented with appropriate antibiotics for overnight growth (12-16 hours). 2% (w/v) glucose is added to integrator strain cultures for conjugation suppression. Overnight integrator cultures were then pelleted by centrifugation and replenished with new 10 mL of LB with the appropriate antibiotics and 0.5% (w/v) arabinose, as well as 100 μM IPTG for pLac integrators or 2.5 mM m-toluate for pXyl integrator and incubated at 37° C. for 2 hours. The base strain overnight culture is also pelleted by centrifugation and replenished with new 10 mL of LB with appropriate antibiotics prior to incubation at the appropriate culturing temperature for 2 hours. Cultures were then pelleted and resuspended in 400 μL of LB. Resuspended donors and recipients were then mixed in a 1:1 donor to recipient ratio (200 μL+200 μL) for a total of 400 μL and spotted in 20 μL aliquots onto a LB-agar plate with the appropriate inducers (0.5% (w/v) arabinose and 100 μM IPTG or 2.5 mM m-toluate) and no antibiotics. Spots were dried under a flame before incubating at 30° C. for 4-8 hours and up to overnight to allow for conjugation coupled transposition activity. Spots were resuspended with 200-750 μL of 0.5× LB for direct plating on selective LB-agar plates that would only allow base strains with the desired genome integration to survive. Plates were incubated at the appropriate culturing temperature of the base strain overnight. Colonies were picked from plates and streaked out on fresh selective LB-agar plates for genotyping PCR before the subsequent round of OASIS conjugative transposition of the final Cassette. Strains with both Cassettes inserted and validated were either transformed with pAra-Trans by electroporation or with RK24 by conjugation.

### Agroinfiltration Experiments

[0238] N. benthamiana plants were grown from seed in a Vivosun growth chamber (Amazon) at a constant temperature of 25° C., humidity between 40-50% and a 16/8 day/night cycle. Plants were grown in soil (3 parts Propagation mix (Sphagnum Peat Moss), 1 part Perlite, 1 part Vermiculite, 2 μg/L 14-14-14 Osmocote and 0.6 μg/L Micromax). Plants were grown for 7-8 weeks prior to infiltration.

[0239] To prepare engineered and control Agrobacterium strains for N. benthamiana infiltration, glycerol stock resuspensions were struck out on LB/agar plates with kanamycin (50 μg/μL, pCT001-YPET/genomic insertions), gentamicin (pTi, 15 μg/μL) and tetracycline (15 μg/μL, pSOUP) and incubated at 30° C. for 2-3 days. Following incubation, a single isolated colony was picked, per strain, and grown overnight in 3 mL LB with kanamycin, gentamicin and tetracycline. The following day, cultures were centrifuged at 4000 g for 10 min and resuspended in 3 mL freshly made induction media (10 mM MES pH 5.5, 10 mM MgCl2 and 200 μM acetosyringone (diluted in Ethanol)). Cultures were then incubated in a shaking incubator at 200 rpm for 4 hours at room temperature. Prior to infiltration, cultures were diluted to OD 600 of 0.4.

[0240] A 1 mL needleless syringe was used to infiltrate N. benthamiana leaves with diluted and induced Agrobacterium cultures. Roughly 200 μL of culture, per leaf, was delivered to 3 individual leaves on a one agrobacteria strain per plant basis. For each infiltration, culture was added to the syringe and the tip of the syringe was directed to the abaxial surface of the leaf. Counter pressure from the adaxial surface was applied using a finger to encourage infiltration. Following infiltration, the day/night cycle was switched to 12/12.

[0241] Leaf tissue samples were harvested 72-96 hours following infiltration using a standard hole-punch. Fluorescent images of tissue samples were acquired using a confocal laser scanning microscope (LSM-800, Zeiss) with a 20× objective.

### Solid Agar Hemolysis Assay

[0242] Bacterial cultures were grown overnight at 30° C. in LB with appropriate antibiotics. The next day, cultures were pelleted and resuspended with their supernatant to an OD600 of 10, after which 10 μL of the resuspension was spotted on solid agar plates consisting of Columbia media supplement with 5% v/v defibrinated sheep blood (Lampire Biological Laboratories) and incubated at 30° C. for 24 hours. Characterization of promoter types housed within imported regions of chimeric genomes.

[0243] Chimeric genomes made between V. natriegens as a recipient and E. coli as a donor were chosen to screen and identify promoter classes found within imported genomic segments of chimeric genomes. Briefly, three hypothetical promoter classes (here, I. Strong promoters in both V natriegens and E. coli, II. Strong promoters in V natriegens and weak promoters in E. coli, and III. Weak promoters in V. natriegens and strong promoters in E. coli) were screened by sorting TPM values obtained from RNA-Seq of GEO: 1219067-1110693.1 (V. natriegens-E. coli Chr. 1 chimera), GEO: 1219067-1110693.2 (V. natriegens-E. coli Chr. 2 chimera), V. natriegens and E. coli based on values reported for each. A TPM filter cutoff of at least 50 was selected for strong, detectable promoter expression, and of less than 5 for weak, hard to detect promoter expression. The top 10 genes were selected from resulting gene lists, and their respective expression profiles were visualized through a heatmap. For Promoter Class I, a subset of promoters identified in the unfiltered list were selected and validated to be functional and equivalent to strong synthetic promoters in both V natriegens and E. coli. Briefly, class I promoters were cloned upstream of a riboJ insulator sequence and a green fluorescent reporter gene, and relative fluorescence units (r.f.u.) were quantified following normalization at OD600 1 using a Tecan Spark plate reader.

### Growth Curve Measurements

[0244] Bacterial cultures were inoculated the night before in LB and appropriate antibiotics and grown overnight for 12-16 hours. Cultures were pelleted by centrifugation (4000 rpm for 10 minutes) and spent media was replaced with the same volume of fresh LB without antibiotics. Cultures were then diluted to 0.04 into 1 mL of fresh LB without antibiotics and 200 μL of the dilution was aliquoted onto a 96-well plate. Growth experiments were performed with three technical replicates per strain. Growth experiment was performed on a Tecan Spark® Multimode Microplate Reader for 20 hours at 37° C. with double orbital shaking at 108 rpm. OD₆₀₀ readings were taken every 15 minutes. Data was truncated at 12 hours to account for evaporation of the wells causing disturbance of the OD₆₀₀ readings late into the experiment.

### Validation of Genome Integrity of Chimeric Genomes Throughout Growth Generations.

[0245] Representative chimeric genomes were grown for over 100 generations at either 30° C. or 37° C. in rich media of different complexities (here, LB and TB), or M9 minimal media conditions using 0.4% w/v glucose as a carbon source. Briefly, strains were initially inoculated from glycerol stock and continuously grown in 10 mL of media for 24 hours in the aforementioned conditions. The following day, the cultures were back diluted in 10 mL of media and re-grown overnight under the same conditions. This procedure was repeated over the course of 5 days, assuming a conservative estimate of 20 generations per day based on the lowest generation time reported for chimeric genomes tested in this study.

### Confocal Microscope Imaging

[0246] Morphology and phenotype of chimeric strains were observed with a confocal laser scanning microscope (Zeiss LSM 800). Bacteria cells are seeded on the LB agarose gel pads and then mounted on the glass-bottom confocal dish. Phase contrast and fluorescence images were acquired using an oil immersion objective plan-apochromat 100×/1.4.

### Whole Genome Sequencing (WGS)

[0247] Bacterial cultures were grown in LB supplemented with the appropriate antibiotics until confluent. Cultures were pelleted by centrifugation and genomic DNA (gDNA) was extracted from the pellets using DNeasy Blood & Tissue Kit (QIAGEN™ cat #69504) per manufacturer instructions. Concentrations of gDNA were quantified with the Invitrogen Qubit™ 4 Fluorometer using the 1×dsDNA High Sensitivity (HS) assay kit (Thermo Fisher Scientific cat #Q33231). For library preparation, Nextera™ DNA Flex Library Prep Kit (Illumina) was used per manufacturer instructions to tag, barcode, amplify and add index primers (i5 and i7) to the library. 200 ng of starting gDNA was used per barcoded library. Prepared libraries were quantified with the Qubit™ 4 Fluorometer before pooling 15 ng per barcoded library. Pooled library denaturation and flow cell loading was performed per manufacturer instructions. Sequencing was performed on an Illumina MiSeq using MiSeq reagent kit v3 (600-cycles) with 300 bp paired-end reads and automated demultiplexing and adapter trimming.

[0248] All WGS of strains was performed as above with the exception of E. coli DH10B Δdif::S. flexneri-1Mbdif Sequencing libraries for this strain were prepared and sequenced on an Illumina NextSeq2000 with 50 bp paired-end reads by the Millard and Muriel Jacobs Genetics and Genomics Laboratory at the California Institute of Technology.

### WGS Analysis

[0249] Sequencing reads from whole-genome samples were aligned to expected reference genomes using the Bowtie2 short-read aligner. Alignment files were further processed with Samtools and deepTools was used to estimate RPGC throughout the expected reference genome in 10-kb bins. References for gene homolog variants for the recipient and donor strains were identified via a reciprocal alignment approach using Blast. Identified gene homolog variants were used as references to estimate, independent of short-read sequence alignment, the read fraction allocated to each respective reference position. The read fraction estimation per reference was calculated as the sum of counts across 14-bp bins encompassing distinct nucleotide polymorphisms detected via multiple-sequence alignment using MUSCLE.

### Transposon Sequencing (Tn-Seq)

[0250] Colonies on post-ACE selection plates were scraped into 4 mL of LB and grown in appropriate antibiotics for 4 hours before 1 mL of culture was pelleted by centrifugation. gDNA was extracted from the pelleted cell populations using DNeasy Blood & Tissue Kit (QIAGEN™ cat #69504) per manufacturer instructions. Concentrations of gDNA were quantified with the Invitrogen Qubit™ 4 Fluorometer. For Tn-Seq library preparation, 200 ng of starting gDNA was tagmented and washed with Nextera™ DNA Flex Library Prep Kit as per manufacturer instructions. For library amplification and barcoding, custom index 2 (i5) oligonucleotides annealing to the RE of Tn6677 were used instead of the standard i5 indices (see Table 4A). These custom i5 oligos were used alongside standard index 1 (i7) oligos provided Illumina with 15× cycles of library amplification PCR at 65° C. annealing (all else according to the manufacturer). Barcoded libraries were cleaned up as per manufacturer instructions and Qubit™ 4 Fluorometer before 30 ng per library was pooled together. Pooled library denaturation and flow cell loading was performed per manufacturer instructions. Prior to sequencing, a custom sequencing primer for the RE of Tn6677 was spiked into the reagent kit in well 12 (Read 1 HP10) at a final concentration of 0.5 μM to enable targeted sequencing of enriched transposon sequences within the libraries. Sequencing was performed on an Illumina MiSeq using MiSeq reagent kit v3 (600-cycles) with 300 bp paired-end reads and automated demultiplexing and adapter trimming.

### Tn-Seq Analysis

[0251] Custom Python pipelines were developed to process Tn-Seq data generated from ACE experiments, according to previously described methods. Briefly, reads containing the 15-bp 5′-terminal sequence of the enriched Tn arm end were then selected and the upstream 17-bp region was used as a genomic footprint corresponding to the integration site in the genome. Fingerprint sequences were then aligned to expected reference genomes using Bowtie2. Alignment positions documented per read were later grouped into unique 10-kb bins, and unless stated otherwise insertion frequencies were plotted as a percentage of total mapping reads. The on-target percentage was calculated as the percentage of reads corresponding to integration events within the 10-kb window flanking the target integration site. The integration orientation bias is defined as the ratio of number of reads corresponding to T-RL insertions to those corresponding to T-LR insertions.

### RNA Sequencing (RNA-Seq)

[0252] For RNA-Seq of E. coli DH10B Δdif+2-Mb Syn61 Syn-seg. 1 and its progenitor donor and recipient strains, bacterial cultures were grown in LB supplemented with the appropriate antibiotics overnight. The next day, the cultures were back diluted to OD₆₀₀ of 0.05 in fresh 10 mL of LB without any antibiotics and grown to an OD₆₀₀ of 0.6. 1 mL of the culture was pelleted by centrifugation for RNA extraction using RNeasy Protect Bacteria Mini Kit (QIAGEN™ cat #74524). Extracted RNA was quantified using Invitrogen Qubit™ 4 Fluorometer using the RNA High Sensitivity (HS) assay kit (Thermo Fisher Scientific cat #Q32852). Sequencing libraries from extracted RNA samples were prepped and sequenced on an Illumina NextSeq2000 with 50 bp paired-end reads by the Millard and Muriel Jacobs Genetics and Genomics Laboratory at the California Institute of Technology. RNA-Seq experiments were performed with three technical replicates per strain.

[0253] For RNA-Seq and differential gene expression of E. coli DH10B Δdif::Syn. Seg 1-S. flexneri-1Mbdif E. coli DH10B Δdif::S. flexneri-1Mbdif E. coli MDS42 Δdif::S. flexneri-1Mbdif and associated donor and recipient strains, and additionally for differential gene expression of E. coli DH10B Δdif+2-Mb Syn61 Syn-seg. 1 and associated donor and recipient strains, bacterial cultures were grown in LB supplemented with the appropriate antibiotics overnight. The next day, the cultures were back diluted to OD₆₀₀ of 0.05 in fresh 10 mL of LB without any antibiotics and grown to an OD₆₀₀ of 0.6. 500 μL of the culture was pelleted by centrifugation and frozen for submission to GENEWIZ (USA; genewiz.com), for RNA extraction with rRNA depletion, library preparation and standard RNA sequencing on an Illumina NovaSeq6000 with 150 bp paired-end reads. RNA-Seq experiments were performed with three technical replicates per strain.

### RNA-Seq Analysis

[0254] Custom Python pipelines were developed to quantify RNA sequencing reads uniquely mapping to gene homolog references. Sequencing reads from whole-transcriptome RNA samples were first aligned to expected transcriptome references per expected genome reference using the Bowtie2 short-read aligner. Because reads can map to multiple gene homolog variants, counts were allocated to specific gene homolog references by using discriminatory 14-bp bins per reference (identified via MUSCLE). The raw counts per gene homolog reference was then transformed to log(TPM+1) and plotted using various visualization and analysis pipelines written in Python. For differential expression analysis, raw counts of triplicate samples were further processed via DESeq2, internally normalizing samples and calculating fold-change and adjusted p-values per transcript reference. DESeq2 results were illustrated as a volcano plot, highlighting enrichment of redundant genes within expected references. Gene ontology pathway enrichment analysis was performed using ShinyGO on the intersection of over-expressed genes in chimeric ACE samples, as defined by an adjusted p-value<0.001 and a fold-change ≥1.

### Sample Preparation for Proteomic Analysis

[0255] E. coli cell pellets were resuspended in 5% sodium dodecyl sulfate (Sigma-aldrich) in 50 mM HEPES, and were homogenized using BeatBox (Preomics) for 10 min under ‘High’ settings. Protein concentration was measured using Pierce BCA protein assay kit (Pierce), and 100 g of protein was used for further sample preparation. The samples were reduced using 5 mM tris(2-carboxyethyl)phosphine (Sigma-Aldrich) under 55° C. for 10 min, and then alkylated with chloroacetamide (Sigma-Aldrich) under room temperature for 15 min. The samples were further acidified to a final concentration of 2.5% phosphoric acid, and 25 μl of sample was combined with 165 μl of 90% methanol with 10% of 1 M triethylammonium bicarbonate (TEAB, Thermo Scientific) according to protocols known in the art. The samples were then loaded onto S-trap (Protifi) devices, and the S-trap devices were washed using the same buffer for loading (90% methanol with 10% of 1 M TEAB) for 3 times. For each loading or washing steps, the S-trap devices were centrifuge at 4000 g for 30 seconds to remove the elute. After washing steps, 20 μl of 100 mM TEAB containing 10 μg of TPCK-trypsin (Thermo Scientific) was added into each sample, and the digestion was allowed to proceed overnight. The digested peptides were eluted using 40 μl of 50 mM TEAB in water, 0.2% formic acid in water, and 50% acetonitrile in water sequentially with 4000 g centrifugation for 1 min for each elution. The eluate for 3 steps were pooled together and dried using a refrigerated CentiVap concentrator (Labconco). The dried samples were stored in −20° C. before resuspended in mobile phase A (2% acetonitrile, 0.2% formic acid, and 97.8% water) for LC-MS/MS analysis.

### LC-MS/MS for Proteomic Analysis

[0256] For proteomic samples, LC-MS/MS experiments were performed by loading 500 ng sample onto an EASY-nLC 1200 (ThermoFisher Scientific, San Jose, CA) connected to an Q Exactive HF Quadrupole—Orbitrap Hydrid mass spectrometer (Thermo Fisher Scientific, San Jose, CA). Peptides were separated on an Aurora Ultimate XT UHPLC column (25 cm×75 m, 1.6 m C18, AUR3-25075C18-XT, Ion Opticks) with a flow rate of 0.35 μL/min and for a total duration of 131 min. The gradient was composed of 3% Solvent B for 1 min, 3-19% B for 72 min, 19-29% B for 28 min, 29-41% B for 20 min, 41-95% B for 3 min, and 95-98% B for 7 min. Solvent A consists of 97.8% H₂O, 2% ACN, and 0.2% formic acid, and solvent B of 19.8% H₂O, 80% ACN, and 0.2% formic acid. MS1 scans were acquired with a range of 375-1500 m/z in the Orbitrap at 60 k resolution. The maximum injection time was 15 ms, and the AGC target was 3×10⁶. MS2 scans were acquired at 30 k resolution with a first scan mass as 100 Da. The maximum injection time was 45 ms, and the AGC target was 3×10⁶. The isolation window was 1.2 m/z, collision energy was 28 NCE, and loop count is 12. Other global settings were set to the following: ion source type, NSI; spray voltage, 2000 V; ion transfer tube temperature, 300° C. Method modification and data collection were performed using Xcalibur software (Thermo Scientific).

### Proteomics Data Analysis

[0257] Proteomic analysis was performed using Proteome Discoverer 2.5 (PD 2.5, Thermo Scientific) software, and SequestHT with Percolator validation. The raw data was searched against Escherichia coli proteome (retrieved from Uniprot Knowledgebase on 2020 Nov. 2) with the list of inserted proteins for each insertion, respectively. Percolator FDRs were set at 0.01 (strict) and 0.05 (relaxed). Peptide FDRs was set at 0.01 (strict) and 0.05 (relaxed), with medium confidence and a minimum peptide length of 6. Carbamidomethyl (C) was set as a static modification; oxidation (M) was set as a dynamic modification; acetyl (protein N-term), Met-loss (Protein N-term M) and Met-loss+acetyl (Protein N-term M) were set as dynamic N-Terminal modifications.

[0258] Further analysis was performed using in-house python script. Briefly, only the data with raw intensity higher than 100000 was subjected to further analysis, and all the quantitation from match-between-run analysis was eliminated to prevent false discovery. The data was further normalized to each sample's median value for the PCA analysis and heatmap. PCA analysis was performed using scikit-learn v1.3.0 python package.

Metabolite Extraction from Cell Pellet

[0259] E. coli cell pellets were resuspended in 1 mL acetonitrile (MS grade, Fisher Scientific), and homogenized using BeatBox (Preomics). The homogenized samples were centrifuged under 16000 g for 10 min, and the supernatant was dried using a refrigerated CentiVap concentrator (Labconco). The dried samples were stored in −80° C. before being resuspended in 50 μl of mobile phase A (2% acetonitrile, 0.2% formic acid, and 97.8% water) for LC-MS/MS analysis.

Metabolite Extraction from Culture Medium

[0260] 5 ml of culture medium was extracted with equivalent amount of ethyl acetate (Fisher Scientific) at 37° C. for 1 h. The ethyl acetate extraction was dried and resuspended in 50 μl of mobile phase A (2% acetonitrile, 0.2% formic acid in water).

### LC-MS/MS for Metabolomic Analysis

[0261] For metabolic samples, LC-MS/MS experiments were performed by loading 5 μl of metabolite extract onto an Vanquish HPLC (ThermoFisher Scientific, San Jose, CA) connected to an Orbitrap Fusion Tribrid mass spectrometer (Thermo Fisher Scientific, San Jose, CA). Peptides were separated on a Kinetex C18 column (100×4.6 mm, 2.6 m C18, 100 Å, H17-133371, Phenomenex) with a flow rate of 0.3 mL/min and for a total duration of 30 min. The gradient was composed of 5-30% B for 2 min, 30-95% B for 24 min, 95% B for 2 min, 95-5% B for 1 min, and 5% B for 3 min. Solvent A consists of 99.8% H₂O, and 0.2% formic acid, and solvent B of 99.8% ACN, and 0.2% formic acid. MS1 scans were acquired with a range of 375-1500 m/z in the Orbitrap at 50 k resolution. The maximum injection time was 100 ms, and the AGC target was 1×10⁶. MS2 scans were acquired at 7.5 k resolution. The maximum injection time and the AGC target was set as auto. The isolation window was 1.2 m/z, collision energy was 30 NCE, and loop time was 2 seconds. Other global settings were set to the following: ion source type, H-ESI; spray voltage, 4200 V (positive) and 3500 V (negative); ion transfer tube temperature, 350° C.; and vaporizer temperature, 200° C. Method modification and data collection were performed using Xcalibur software (Thermo Scientific).

### Metabolomics Data Analysis

[0262] Peak alignment and quantitation were performed with Compound Discoverer 3.3 (Thermo Scientific) using an untargeted metabolomics workflow. All the identified features were listed and subjected to similar in-house python script as the proteomic analysis. PCA analysis was performed using scikit-learn v1.3.0 python package. Annotation of orfamide B, orfamide C, pyoluteorin, and rhizoxins were performed manually by assigning the experimental m/z to the theoretical m/z with a tolerance of 10 ppm.

### Data Reporting

[0263] No statistical methods were used to predetermine sample size. The experiments were not randomized, and investigators were not blinded to allocation during experiments and outcome assessment.

### Statistical Analysis

[0264] Unless stated otherwise, statistical analysis on triplicates for experiments describing the efficiency and precision of ACE were performed by calculating the mean and standard deviation (SD) of each experimental sample group. For transcriptomic analysis, raw counts were converted to log(TPM+1), where each transcript count was normalized by the expected transcript reference length. Differential expression analysis was carried out using DESeq2 using raw counts of samples as input. The following cutoffs were applied to demark significant changes in RNA expression in the context of massively expanded genomes: a base expression value (raw count) >5, an adjusted p-value f 0.001, and a fold-change of 1. Gene ontology pathway enrichment analysis was performed using standard parameters in ShinyGO 0.77, only showing up to 10 pathways.

[0265] Table 2A-Table 9 below display exemplary sequences and data of the present disclosure.

TABLE 2A
Parental Strains (Base Strains)

| ID | Strain* | Description# |
|---|---|---|
| Base 1 | E. coli DH10B rpsL K43R | Standard E. coli cloning strain with |
| | | streptomycin resistance |
| Base 2† | E. coli DH10B Δdif::lux | Derived from (1) E. coli cloning strain for ACE |
| | | recipients |
| Base 3† | E. coli DH10B Syn100ΔlacZ | Derived from (1) E. coli cloning strain using |
| | | REXER mediated insertion of Syn 100 for ACE |
| | | donors |
| Base 4 | E. coli MDS42 rpsL K43R | Minimized E. coli strain with streptomycin |
| | | resistance |
| Base 5† | E. coli MDS42 ΔrecA | Derived from (4) minimized E. coli strain with |
| | | deletion of recA for ACE recipients and donors |
| Base 6† | E. coli MDS42 ΔrecA Δtus | Derived from (5) minimized E. coli strain with |
| | | deletion of recA and tus for ACE donors |
| Base 7 | E. coli Syn61 rpsL K43R pheS*-hygroR | Derived from (4) minimized E. coli with a |
| | | completely recoded genome |
| Base 8† | E. coli Syn61 rpsL K43R ΔpheS*-hygroR | Derived from (7) minimized, recoded E. coli |
| | | with deletion of pheS *-hygroR for ACE donors |
| Base 9 | Shigella flexneri CFS100 | Derived from Shigella flexneri str. 247T |
| | | serotype 2a (ATCC 700930) with the virulence |
| | | plasmid cured (ApVir) |
| Base 10† | Shigella flexneri CFS100 rpsL K43R ΔrecA | Derived from (9) avirulent S. flexneri strain |
| | Δtus ΔoriT ΔhigB Δhok | with streptomycin resistance, deletion of recA |
| | | and tus, in addition deletions of genome oriT |
| | | sequence and deletion of higB toxin of the |
| | | higAlhigB antitoxin-toxin system and deletion |
| | | of hok toxin of the hok/sok antitoxin-toxin |
| | | system stabilizing an episome found in S. |
| | | flexneri CFS100, deletion of these toxins |
| | | enabled curing of said episome, which shares |
| | | the same plasmid incompatability group as the |
| | | pBelo bacterial artificial chromosome (BAC) |
| | | backbone. This strain was used for construction |
| | | of ACE donors |
| Base 11 | Vmax Express | Derived from Vibrio natriegens ATCC 14048 |
| | | DSM759, fast growing bacterial strain for ACE |
| | | recipients |
| Base 12 | Pseudomonas putida KT2440 (ATCC | Sourced from American Type Culture |
| | 47054) | Collection (ATCC), for ACE recipients |
| Base 13 | Pseudomonas protegens pf-5 | Also known as Pseudomonas protegens pf-5 |
| | | ATCC BAA-477, for ACE donors |
| Base 14 | Agrobacterium tumefaciens GV3101 | Derived from the A. tumefaciens C58 |
| | | chromosomal background with Ti plasmid |
| | | pMP90 (pTiC58DT-DNA) for ACE recipients |
| | | and plant transformation |

*Note that all strains of E. coli DH10B, E. coli MDS42 and E. coli Syn61 as well as S. flexneri are built on rpsL K43R background. All S. flexneri strains are built on attenuated multiple deletion strain. rpsL K43R is omitted except in the source strain to avoid redundacy.
#Any genomic modification performed on each strain was done with homologous recombination unless otherwise stated. Recombination for gene deletions or donor strain engineering was done with the pKW20 helper plasmid in the case of E. coli DH10B or E. coli MDS42 or with pCDFkan-pAraRed-recA for E. coli Syn61.
†This study

TABLE 2B
Parental Strains (Donor and Helper Strains) †

| ID | Strain |
|---|---|
| Donor 1 | E. coli DH10B-Syn100ΔlacZ-1R-10Kb-2L |
| Donor 2 | E. coli DH10B-Syn100ΔlacZ-1R-50Kb-2L |
| Donor 3 | E. coli DH10B-Syn100ΔlacZ-1R-100Kb-2L |
| Donor 4 | E. coli MDS42-lacZ-1R-200Kb-2L |
| Donor 5 | E. coli Syn61-1R-100Kbdif-2L |
| Donor 6 | E. coli Syn61-1R-600Kbdif-2L |
| Donor 7 | E. coli Syn61-1R-1Mbdif-2L |
| Donor 8 | E. coli Syn61-1R-2Mbdif-2L Syn Seg. 1 |
| Donor 9 | E. coli Syn61-1R-1Mb-2L Syn Seg. 2 |
| Donor 10 | E. coli Syn61-1R-500Kb-2L Syn Seg. 3 |
| Donor 11 | E. coli Syn61-1R-500Kb-2L Syn Seg. 4 |
| Donor 12 | E. coli Syn61-1R-1MboriC-2L Syn Seg. 5 |
| Donor 13 | S. flexneri 2a-1R-1Mbdif-2L |
| Donor 14 | E. coli MDS42-1R-1Mbdif-2L |
| Donor 15 | E. coli MDS42-1RRB-100Kbdif-2LBL (T-DNA) |
| Donor 16 | S. flexneri 2a-1R-1500Kbdif-2L |
| Donor 17 | P. protegens pf-5-1R-orfamide-2L (80Kb) |
| Donor 18 | P. protegens pf-5-1R-rhizoxin-2L (140Kb) |
| Donor 19 | P. protegens pf-5-1R-pyrrolnitrin-2L (60Kb) |
| Donor 20 | P. protegens pf-5-1R-pyoluteorin-2L (66Kb) |
| Donor 21 | P. protegens pf-5-1R-pyoverdine-2L (246Kb) |
| Donor 22 | P. protegens pf-5-1R-citronellol-pyoverdine-2L (373Kb) |
| Donor 23 | P. protegens pf-5-1R-pyoverdine-citronellol-2L (395Kb) |
| Donor 24 | P. protegens pf-5-1R-pyoluteorin-rhizoxin-2L (415Kb) |
| Donor 25 | P. protegens pf-5-1R-citronellol-2L (522Kb) |
| Donor 26 | E. coli Syn61-1luxA-100Kbdif-2luxA |
| Donor 27 | E. coli Syn61-1luxA-1Mbdif-2luxA |
| Donor 28 | E. coli Syn61-1luxA-2Mbdif-2luxA |
| Helper 1* | E. coli Pirl pEVS104 |
| Helper 2* | E. coli ECNR2.ΔtolC. mutS:zeo pRK24 |

*From addgene
† Note that all strains of E. coli DH10B, E. coli MDS42 and E. coli Syn61 as well as S. flexneri are built on rpsL K43R background. All S. flexneri strains are built on attenuated multiple deletion strain. rpsL K43R is omitted except in the source strain to avoid redundacy.

TABLE 2C
Parental Strains (Recipient Strains) †

| ID | Strain |
|---|---|
| Recipient 1 | E. coli DH10B Δdif::lux CAST-TS1 |
| Recipient 2 | E. coli DH10B Δdif::lux CAST-TS2 |
| Recipient 3 | E. coli DH10B Δdif::lux CAST-TS3 |
| Recipient 4 | E. coli DH10B Δdif::lux CAST-luxA* |
| Recipient 5 | E. coli DH10B Δdif::lux CAST-luxB1 |
| Recipient 6 | E. coli DH10B Δdif::lux CAST-luxB2 |
| Recipient 7 | E. coli DH10B Δdif::lux CAST-NT |
| Recipient 8 | E. coli DH10B Δdif::lux CAST-ΔcrRNA |
| Recipient 9 | E. coli DH10B Δdif::lux CAST-Δcascade |
| Recipient 10 | E. coli DH10B Δdif::lux CAST-ΔQcascade |
| Recipient 11 | E. coli DH10B Δdif::lux CAST-Δtns |
| Recipient 12 | E. coli DH10B Δdif::lux ΔCAST |
| Recipient 13 | E. coli DH10B CAST-TS1 |
| Recipient 14 | E. coli DH10B CAST-TS3 |
| Recipient 15 | E. coli DH10B CAST-dif |
| Recipient 16 | E. coli MDS42 CAST-dif |
| Recipient 17 | P. putida KT2440 kanRSFCAST-glmS |
| Recipient 18 | V. natriegens DSM759 carbRSFCAST-wbfF |
| Recipient 19 | V. natriegens DSM759 carbRSFCAST-difch1 |
| Recipient 20 | V. natriegens DSM759 carbRSFCAST-difch2 |
| Recipient 21 | E. coli DH10B Δdif::Syn. Seg 1 CAST-dif |
| Recipient 22 | A. tumefaciens spectVS1CAST-flaA |
| Recipient 23 | A. tumefaciens spectVS1CAST-agpI |
| Recipient 24 | A. tumefaciens spectVS1CAST-tetA |
| Recipient 25 | A. tumefaciens spectVS1CAST-dif(agro) |
| Recipient 26 | E. coli DH10B Δdif::lux hygroCDFCAST-TS2 |
| Recipient 27 | E. coli DH10B Δdif::lux hygroCDFCAST-TS3 |
| Recipient 28 | E. coli DH10B hygroCDFCAST-dif |
| Recipient 29 | E. coli DH10B hygroCDFCAST-TS2 |
| Recipient 30 | E. coli DH10B hygroCDFCAST-TS3 |
| Recipient 31 | E. coli DH10B hygroCDFCAST-TS4 |
| Recipient 32 | E. coli DH10B hygroCDFCAST-TS5 |
| Recipient 33 | E. coli DH10B Δdif::lux pKW20 |
| Recipient 34 | E. coli DH10B Δdif::lux pKW20 sgRNA-luxA |

† Note that all strains of E. coli DH10B, E. coli MDS42 and E. coli Syn61 as well as S. flexneri are built on rpsL K43R background. All S. flexneri strains are built on attenuated multiple deletion strain. rpsL K43R is omitted except in the source strain to avoid redundacy.

TABLE 2D
Parental Strains (OASIS Strains) †

| ID | Strain |
|---|---|
| OASIS 1 | E. coli DH10B pBAD-traRP4min pLac-OrthoCAST1-1500KbShigella-START |
| OASIS 2 | E. coli DH10B pBAD-traRP4min pLac-OrthoCAST2-1500KbShigella-STOP |
| OASIS 3 | E. coli DH10B pBAD-traRP4min pXyl-OrthoCAST1-orfamide-START |
| OASIS 4 | E. coli DH10B pBAD-traRP4min pXyl-OrthoCAST2-orfamide-STOP |
| OASIS 5 | E. coli DH10B pBAD-traRP4min pXyl-OrthoCAST1-rhizoxin-START |
| OASIS 6 | E. coli DH10B pBAD-traRP4min pXyl-OrthoCAST2-rhizoxin-STOP |
| OASIS 7 | E. coli DH10B pBAD-traRP4min pXyl-OrthoCAST1-pyrrolnitrin-START |
| OASIS 8 | E. coli DH10B pBAD-traRP4min pXyl-OrthoCAST2-pyrrolnitrin-STOP |
| OASIS 9 | E. coli DH10B pBAD-traRP4min pXyl-OrthoCAST1-pyoluteorin-START |
| OASIS 10 | E. coli DH10B pBAD-traRP4min pXyl-OrthoCAST2-pyoluteorin-STOP |
| OASIS 11 | E. coli DH10B pBAD-traRP4min pXyl-OrthoCAST1-pyoverdine-START |
| OASIS 12 | E. coli DH10B pBAD-traRP4min pXyl-OrthoCAST2-pyoverdine-STOP |
| OASIS 13 | E. coli DH10B pBAD-traRP4min pXyl-OrthoCAST1-citronellol-START |
| OASIS 14 | E. coli DH10B pBAD-traRP4min pXyl-OrthoCAST2-citronellol-STOP |

*Note that all strains of E. coli DH10B, E. coli MDS42 and E. coli Syn61 as well as S. flexneri are built on rpsL K43R background. All S. flexneri strains are built on attenuated multiple deletion strain. rpsL K43R is omitted except in the source strain to avoid redundacy.

TABLE 3
Plasmids

| | | SEQ ID |
|---|---|---|
| Plasmid | Description | NO: |
| CDFtet-AraBADRedCas9- | CDF tetR backbone carrying araC and pBAD inducible | N/A |
| tracrRNA (pKW20) | Cas9 and lambda alpha and beta genes | |
| CDFkan-AraBADRed-recA | CDF kanR backbone carrying araC and pBAD inducible | 1 |
| | recA and lambda alpha and beta genes | |
| pAraBAD-traRP4min | pMB1 carbR backbone carrying araC and pBAD inducible | N/A |
| | minimized tra operons for the RP4 family conjugation | |
| | system | |
| Belo-apraR-AraBAD-traRP4min | pBelo apraR backbone carrying araC and pBAD inducible | 2 |
| (pAra-Trans) | minimized tra operons for the RP4 family conjugation | |
| | system | |
| pSL1777 (pEffector) | CDF spectR backbone carrying constitutively expressed | N/A |
| | Type I-F Tn6677 CAST system with empty spacer DNA | |
| | for crRNA golden gate assembly | |
| CDF-spectR-AraBAD-CAST-GG | CDF spectR backbone carrying araC and pBAD inducible | 3 |
| (pAra-CAST-GG) | Type I-F Tn6677 CAST system with golden gate acceptor | |
| | site | |
| CDF-spectR-AraBAD-CAST-TS1 | As with pAra-CAST-GG but with constitutive TS1 | 4 |
| (pAra-CAST-TS1) | targeting crRNA | |
| CDF-spectR-AraBAD-CAST-TS2 | As with pAra-CAST-GG but with constitutive TS2 | 5 |
| (pAra-CAST-TS2) | targeting crRNA | |
| CDF-spectR-AraBAD-CAST-TS3 | As with pAra-CAST-GG but with constitutive TS3 | 6 |
| (pAra-CAST-TS3) | targeting crRNA | |
| CDF-spectR-AraBAD-CAST- | As with pAra-CAST-GG but with constitutive luxA* | 7 |
| luxA* (pAra-CAST-luxA*) | targeting crRNA | |
| CDF-spectR-AraBAD-CAST- | As with pAra-CAST-GG but with constitutive luxB1 | 8 |
| luxB1 (pAra-CAST-luxB1) | targeting crRNA | |
| CDF-spectR-AraBAD-CAST- | As with pAra-CAST-GG but with constitutive luxB2 | 9 |
| luxB2 (pAra-CAST-luxB2) | targeting crRNA | |
| CDF-spectR-AraBAD-CAST-dif | As with pAra-CAST-GG but with constitutive dif targeting | 10 |
| (pAra-CAST-dif) | crRNA | |
| pSC101-spectR-cassette 1-sC-oriT-pSC101 | spectR backbone carrying sacB cmR oriT and | 11 |
| RE (pCassette(START)) | Tn6677 right trasposon end (R-TE) in consecutive order | |
| pSC101-spectR-cassette2-pHGFP-pSC101 | spectR backbone carrying pheS* hygroR GFP and | 12 |
| LE-oriT (pCassette(STOP)) | Tn6677 left transposon end (L-TE) and oriT in consecutive | |
| | order | |
| CDF-spectR-AraBAD-CAST-NT | As with pAra-CAST-GG but with constitutive NT | 13 |
| (pAra-CAST-NT) | targeting crRNA | |
| CDF-spectR-AraBAD-CAST- | As with pAra-CAST-GG but with deleted crRNA | 14 |
| AcrRNA (pAra-CAST-AcrRNA) | | |
| CDF-spectR-AraBAD-CAST- | As with pAra-CAST-GG but with deleted crRNA cas6 | 15 |
| Acascade (pAra-CAST-Acascade) | cas7 cas8 | |
| CDF-spectR-AraBAD-CAST- | As with pAra-CAST-GG but with deleted crRNA tniQ | 16 |
| AQcascade (pAra-CAST- | cas6 cas7 cas8 | |
| AQcascade) | | |
| CDF-spectR-AraBAD-CAST-Atns | As with pAra-CAST-GG but with constitutive TS2 | 17 |
| (pAra-CAST-Atns) | targeting crRNA and deleted tnsA tnsB and tnsC | |
| CDF-spectR-AraBAD-ACAST | empty CDF spectR araC and pBAD promoter backbone | 18 |
| (pAra-ACAST) | | |
| RSF-carbR-AraBAD-CAST-GG | RSF carbR backbone carrying araC and pBAD inducible | 19 |
| (pAra-RSFcarbR-CAST-GG) | Type I-F Tn6677 CAST system with golden gate acceptor | |
| | site | |
| RSF-carbR-AraBAD-CAST-wbfF | As with pAra-RSFcarbR-CAST-GG but with constitutive | 20 |
| (pAra-RSFcarbR-CAST-wbfF) | wbfF targeting crRNA | |
| RSF-carbR-AraBAD-CAST- | As with pAra-RSFcarbR-CAST-GG but with constitutive | 21 |
| difch1 (pAra-RSFcarbR-CAST- | difch 1 targeting crRNA | |
| difch 1) | | |
| RSF-carbR-AraBAD-CAST- | As with pAra-RSFcarbR-CAST-GG but with constitutive | 22 |
| difch2 (pAra-RSFcarbR-CAST- | difch2 targeting crRNA | |
| difch2) | | |
| RSF-kanR-AraBAD-CAST-GG | RSF kanR backbone carrying araC and pBAD inducible | 23 |
| (pAra-RSFkanR-CAST-GG) | Type I-F Tn6677 CAST system with golden gate acceptor | |
| | site | |
| RSF-kanR-AraBAD-CAST-glmS | As with pAra-RSFkanR-CAST-GG but with constitutive | 24 |
| (pAra-RSFkanR-CAST-glmS) | glmS targeting crRNA | |
| CDF-gentR-AraBAD-Cre-lacI- | CDF gentR backbone carrying araC and pBAD inducible | 25 |
| Bxb1-PhiC31 (pCS20) | Cre recombinase and carrying lacI and IPTG inducible | |
| | Bxb1 and PhiC31 integrases | |
| pSC101-sC-oriT-RE-RB-N7- | | 26 |
| YPETmini-YPET-CaMV35S-LB- | | |
| kanR-LE-oriT (pSTART- | | |
| RBTDNA-STOP-LBTDNA) | | |
| pSC101-spectR-cassette 1-sC-oriT- | | 27 |
| luxA-homology-up | | |
| (pCassette(START-RECM)) | | |
| pSC101-spectR-cassette2-pHGFP- | | 28 |
| luxA-homology-down-oriT | | |
| (pCassette(STOP-RECM)) | | |
| pMB1-ampR-LuxA-sgRNA | | 29 |
| VS1-spectR-AraBAD-CAST-GG | VS1 spectR backbone carrying araC and pBAD inducible | 30 |
| (pAra-VS1spectR-CAST-GG) | Type I-F Tn6677 CAST system with golden gate acceptor | |
| | site | |
| VS1-spectR-AraBAD-CAST-flaA | As with pAra-VS1spectR-CAST-GG but with constitutive | 31 |
| (pAra-VS1spectR-CAST-flaA) | flaA targeting crRNA | |
| VS1-spectR-AraBAD-CAST-agpI | As with pAra-VS1spectR-CAST-GG but with constitutive | 32 |
| (pAra-VS1spectR-CAST-agpI) | agpI targeting crRNA | |
| VS1-spectR-AraBAD-CAST- | As with pAra-VS1spectR-CAST-GG but with constitutive | 33 |
| agrodif (pAra-VS1spectR-CAST- | dif targeting crRNA for agrobacterium | |
| agrodif) | | |
| VS1-spectR-AraBAD-CAST- | As with pAra-VS1spectR-CAST-GG but with constitutive | 34 |
| lineartetA (pAra-VS1spectR- | tetA targeting crRNA for agrobacterium linear | |
| CAST-lineartetA) | chromosome | |
| CDF-spectR-Lac-Tn7007-GG- | CDF spectR backbone carrying lacI and PLac inducible | 35 |
| START (pLac-OrthoCAST1-GG- | Type I-F Tn7007 CAST system with golden gate acceptor | |
| START) | site and Cassette(START) between Tn7007 RE and LE | |
| CDF-spectR-Lac-Tn7011-GG- | CDF spectR backbone carrying lacI and PLac inducible | 36 |
| STOP (pLac-OrthoCAST2-GG- | Type I-F Tn7011 CAST system with golden gate acceptor | |
| STOP) | site and Cassette(STOP) between Tn7011 RE and LE | |
| CDF-spectR-Lac-Tn7007- | As with pLac-OrthoCAST1-GG-START but with 1500kb | 37 |
| 1500kbShigella-START (pLac- | Shigella START targeting crRNA | |
| OrthoCAST1- | | |
| 1500kbShigellaSTART) | | |
| CDF-spectR-Lac-Tn7011- | As with pLac-OrthoCAST2-GG-STOP but with 1500kb | 38 |
| 1500kbShigella-STOP (pLac- | Shigella STOP targeting crRNA | |
| OrthoCAST2- | | |
| 1500kbShigellaSTOP) | | |
| CDF-spectR-Xyl-Tn7016-GG-ST- | CDF spectR backbone carrying xylS and Pm inducible | 39 |
| START (pXyl-OrthoCAST1-GG- | Type I-F Tn7016 CAST system with golden gate acceptor | |
| START) | site and Cassette(START) between Tn7016 RE and LE | |
| CDF-spectR-Xyl-Tn7011-GG- | CDF spectR backbone carrying xylS and Pm inducible | 40 |
| pKGFP-STOP (pXyl- | Type I-F Tn7011 CAST system with golden gate acceptor | |
| OrthoCAST2-GG-STOP) | site and Cassette(STOP) between Tn7011 RE and LE | |
| CDF-spectR-Xyl-Tn7016-orf-sT- | As with pXyl-OrthoCASTI-GG-START but with orfamide | 41 |
| START (pXyl-OrthoCAST1- | START targeting crRNA | |
| orfamideSTART) | | |
| CDF-spectR-Xyl-Tn7011-orf- | As with pXyl-OrthoCAST2-GG-STOP but with orfamide | 42 |
| pKGFP-STOP (pXyl- | STOP targeting crRNA | |
| OrthoCAST2-orfamideSTOP) | | |
| CDF-spectR-Xyl-Tn7016-rhz-sT- | As with pXyl-OrthoCAST1-GG-START but with rhizoxin | 43 |
| START (pXyl-OrthoCAST1- | START targeting crRNA | |
| rhizoxinSTART) | | |
| CDF-spectR-Xyl-Tn7011-rhz- | As with pXyl-OrthoCAST2-GG-STOP but with rhizoxin | 44 |
| pKGFP-STOP (pXyl- | STOP targeting crRNA | |
| OrthoCAST2-rhizoxinSTOP) | | |
| CDF-spectR-Xyl-Tn7016-pyn-sT- | As with pXyl-OrthoCAST1-GG-START but with | 45 |
| START (pXyl-OrthoCASTI- | pyrrolnitrin START targeting crRNA | |
| pyrrolnitrinSTART) | | |
| CDF-spectR-Xyl-Tn7011-pyn- | As with pXyl-OrthoCAST2-GG-STOP but with | 46 |
| pKGFP-STOP (pXyl- | pyrrolnitrin STOP targeting crRNA | |
| OrthoCAST2-pyrrolnitrinSTOP) | | |
| CDF-spectR-Xyl-Tn7016-pyl-sT- | As with pXyl-OrthoCASTI-GG-START but with | 47 |
| START (pXyl-OrthoCAST1- | pyoluteorin START targeting crRNA | |
| pyoluteorinSTART) | | |
| CDF-spectR-Xyl-Tn7011-pyl- | As with pXyl-OrthoCAST2-GG-STOP but with | 48 |
| pKGFP-STOP (pXyl- | pyoluteorin STOP targeting crRNA | |
| OrthoCAST2-pyoluteorinSTOP) | | |
| CDF-spectR-Xyl-Tn7016-pyv-sT- | As with pXyl-OrthoCAST1-GG-START but with | 49 |
| START (pXyl-OrthoCAST1- | pyoverdine START targeting crRNA | |
| pyoverdineSTART) | | |
| CDF-spectR-Xyl-Tn7011-pyv- | As with pXyl-OrthoCAST2-GG-STOP but with | 50 |
| pKGFP-STOP (pXyl- | pyoverdine STOP targeting crRNA | |
| OrthoCAST2-pyoverdineSTOP) | | |
| CDF-spectR-Xyl-Tn7016-cit-sT- | As with pXyl-OrthoCAST1-GG-START but with | 51 |
| START (pXyl-OrthoCAST1- | citronellol START targeting crRNA | |
| citronellolSTART) | | |
| CDF-spectR-Xyl-Tn7011-cit- | As with pXyl-OrthoCAST2-GG-STOP but with citronellol | 52 |
| pKGFP-STOP (pXyl- | STOP targeting crRNA | |
| OrthoCAST2-citronellolSTOP) | | |
| RK24 | | N/A |
| pEVS104 | | N/A |
| CDF-hygroR-AraBAD-CAST-GG | CDF hygroR backbone carrying araC and pBAD inducible | 53 |
| (pAra-hygroR-CAST-GG) | Type I-F Tn6677 CAST system with golden gate acceptor | |
| | site | |
| CDF-hygroR-AraBAD-CAST- | As with pAra-hygroR-CAST-GG but with constitutive TS1 | 54 |
| TS1 (pAra-hygroR-CAST-TS1) | targeting crRNA | |
| CDF-hygroR-AraBAD-CAST- | As with pAra-hygroR-CAST-GG but with constitutive TS2 | 55 |
| TS2 (pAra-hygroR-CAST-TS2) | targeting crRNA | |
| CDF-hygroR-AraBAD-CAST- | As with pAra-hygroR-CAST-GG but with constitutive TS3 | 56 |
| TS3 (pAra-hygroR-CAST-TS3) | targeting crRNA | |
| CDF-hygroR-AraBAD-CAST- | As with pAra-hygroR-CAST-GG but with constitutive TS4 | 57 |
| TS4 (pAra-hygroR-CAST-TS4) | targeting crRNA | |
| CDF-hygroR-AraBAD-CAST- | As with pAra-hygroR-CAST-GG but with constitutive TS5 | 58 |
| TS5 (pAra-hygroR-CAST-TS5) | targeting crRNA | |
| CDF-hygroR-AraBAD-CAST-dif | As with pAra-hygroR-CAST-GG but with constitutive dif | 59 |
| (pAra-hygroR-CAST-dif) | targeting crRNA | |

TABLE 4A
Oligonucleotides and Gene Blocks (Plasmid Construction and TnSeg)

| Name | Description | SEQ ID NO: |
|---|---|---|
| P5_i5-H503_CSP_VchR_v2 | i5-H503 index for RE TnSeq library amplification | 60 |
| P5_i5-H516_CSP_VchR_v2 | i5-H516 index for RE TnSeq library amplification | 61 |
| P5_i5-H502_CSP_VchR_v2 | i5-H502 index for RE TnSeq library amplification | 62 |
| P5_i5-H504_CSP_VchR_v2 | i5-H504 index for RE TnSeq library amplification | 63 |
| CSP_VchR_read1_v2 | custom sequencing of RE during TnSeq | 64 |

TABLE 4B
Oligonucleotides and Gene Blocks (Strain Construction Oligonucleotides)

| | Cassette (START) | | | |
|---|---|---|---|---|
| | Forward | Reverse | Cassette (STOP) | |
| Donor | Primer | Primer | Forward Primer | Reverse Primer |
| E. coli DH10B-Syn100ΔlacZ-1R-10Kb-2L | 65 | 76 | 87 | 101 |
| E. coli DH10B-Syn100ΔlacZ-1R-50Kb-2L | 65 | 76 | 88 | 102 |
| E. coli DH10B-Syn100ΔlacZ-1R-100Kb-2L | 65 | 76 | 89 | 103 |
| E. coli MDS42-lacZ-1R-200Kb-2L | 66 | 77 | 90 | 104 |
| E. coli Syn61-1R-100Kbdif-2L | 67 | 78 | 91 | 105 |
| E. coli Syn61-1R-600Kbdif-2L | 68 | 79 | 92 | 106 |
| E. coli Syn61-1R-1Mbdif-2L | 69 | 80 | 93 | 107 |
| E. coli Syn61-1R-2Mbdif-2L Syn Seg. 1 | 70 | 81 | 94 | 108 |
| E. coli Syn61-1R-1Mb-2L Syn Seg. 2 | 71 | 82 | 95 | 109 |
| E. coli Syn61-1R-1MboriC-2L Syn Seg. 3 | 72 | 83 | 96 | 110 |
| E. coli Syn61-1R-500Kb-2L Syn Seg. 4 | 73 | 84 | 97 | 111 |
| E. coli Syn61-1R-500Kb-2L Syn Seg. 5 | 74 | 85 | 98 | 112 |
| S. flexneri 2a-1R-1Mbdif-2L | 75 | 86 | 99 | 113 |
| E. coli MDS42-1R-1Mbdif-2L | 69 | 80 | 93 | 107 |
| E. coli MDS42-1RRB-100Kbdif-2LBL | 67 | 78 | 100 | 105 |
| E. coli Syn61-1luxA-100Kbdif-2luxA | 67 | 78 | 91 | 105 |
| E. coli Syn61-1luxA-1Mbdif-2luxA | 69 | 80 | 93 | 107 |
| E. coli Syn61-1luxA-2Mbdif-2luxA | 70 | 81 | 94 | 108 |

TABLE 4C
Oligonucleotides and Gene Blocks (Strain Construction Genotyping
Oligonucleotides)

| | Cassette START | | | |
|---|---|---|---|---|
| | Forward | Reverse | Cassette (STOP) | |
| Donor | Primer | Primer | Forward Primer | Reverse Primer |
| E. coli DH10B-Syn100ΔlacZ-1R-10Kb-2L | 114 | 133 | 151 | 169 |
| E. coli DH10B-Syn100ΔlacZ-1R-50Kb-2L | 114 | 133 | 152 | 170 |
| E. coli DH10B-Syn100ΔlacZ-1R-100Kb-2L | 114 | 133 | 153 | 171 |
| E. coli MDS42-lacZ-1R-200Kb-2L | 115 | 134 | 154 | 172 |
| E. coli Syn61-1R-100Kbdif-2L | 116 | 135 | 155 | 173 |
| E. coli Syn61-1R-600Kbdif-2L | 117 | 136 | 156 | 174 |
| E. coli Syn61-1R-1Mbdif-2L | 118 | 137 | 157 | 175 |
| E. coli Syn61-1R-2Mbdif-2L Syn Seg. 1 | 119 | 138 | 158 | 176 |
| E. coli Syn61-1R-1Mb-2L Syn Seg. 2 | 120 | 139 | 159 | 177 |
| E. coli Syn61-1R-1MboriC-2L Syn Seg. 3 | 121 | 140 | 160 | 178 |
| E. coli Syn61-1R-500Kb-2L Syn Seg. 4 | 122 | 141 | 158 | 176 |
| E. coli Syn61-1R-500Kb-2L Syn Seg. 5 | 123 | 142 | 122 | 141 |
| S. flexneri 2a-1R-1Mbdif-2L | 124 | 143 | 161 | 179 |
| E. coli MDS42-1R-1Mbdif-2L | 125 | 137 | 157 | 175 |
| E. coli MDS42-1RRB-100Kbdif-2LBL | 116 | 135 | 155 | 173 |
| S. flexneri 2a-1R-1500Kbdif-2L | 126 | 144 | 162 | 180 |
| P. protegens pf-5-1R-orfamide-2L | 127 | 145 | 163 | 181 |
| P. protegens pf-5-1R-rhizoxin-2L | 128 | 146 | 164 | 182 |
| P. protegens pf-5-1R-pyrrolnitrin-2L | 129 | 147 | 165 | 183 |
| P. protegens pf-5-1R-pyoluteorin-2L | 130 | 148 | 166 | 184 |
| P. protegens pf-5-1R-pyoverdine-2L | 131 | 149 | 167 | 185 |
| P. protegens pf-5-1R-citronellol-pyoverdine-2L | 132 | 150 | 167 | 185 |
| P. protegens pf-5-1R-pyoverdine-citronellol-2L | 131 | 149 | 168 | 186 |
| P. protegens pf-5-1R-pyoluteorin-rhizoxin-2L | 130 | 148 | 164 | 182 |
| P. protegens pf-5-1R-citronellol-2L | 132 | 150 | 168 | 186 |
| E. coli Syn61-1luxA-100Kbdif-2luxA | 116 | 135 | 155 | 173 |
| E. coli Syn61-1luxA-1Mbdif-2luxA | 118 | 137 | 157 | 175 |
| E. coli Syn61-1luxA-2Mbdif-2luxA | 119 | 138 | 158 | 176 |

TABLE 4D
Oligonucleotides and Gene Blocks (ACE Genotyping Oligonucleotides)

| | Forward | Reverse | |
|---|---|---|---|
| Genotype | Primer | Primer | Expected Size |
| R + TS2-Syn100 100Kb Junction | 114 | 187 | 2209 |
| L + TS2-Syn100 100Kb Junction | 188 | 171 | 3545 |
| Syn 100 100Kb Internal 1 | 189 | 190 | 1723 |
| Syn 100 100Kb Internal 2 | 191 | 192 | 1090 |
| R + TS1-Syn100 100Kb Junction | 193 | 114 | 1825 |
| L + TS1-Syn100 100Kb Junction | 171 | 194 | 4037 |
| R − TS1-Syn100 100Kb Junction | 114 | 194 | 2242 |
| L − TS1-Syn 100 100Kb Junction | 193 | 171 | 3620 |
| R + TS3-Syn100 100Kb Junction | 195 | 114 | 1818 |
| L + TS3-Syn 100 100Kb Junction | 171 | 196 | 3509 |
| R + dif-S. flexneri 1Mbdif Junction | 197 | 143 | 519 |
| L + dif-S. flexneri 1Mbdif Junction | 161 | 198 | 3837 |
| R + dif-Syn61 2Mbdif Syn Seg. 1 Junction | 138 | 197 | 546 |
| L + dif-Syn61 2Mbdif Syn Seg. 1 Junction patched | 198 | 158 | 465 |
| L + dif-Syn61 2Mbdif Syn Seg. 1 Junction unpatched | 198 | 158 | 3580 |

TABLE 5
Donor Boundaries

| | Cassette (START) | | Cassette (STOP) | |
|---|---|---|---|---|
| | Upstream | Downstream | Upstream | Downstream |
| Donor | Homology | Homology | Homology | Homology |
| E. coli DH10B-Syn100ΔlacZ-1R-10Kb-2L | 199 | 210 | 223 | 234 |
| E. coli DH10B-Syn100ΔlacZ-1R-50Kb-2L | 199 | 210 | 224 | 235 |
| E. coli DH10B-Syn100ΔlacZ-1R-100Kb-2L | \|199 | \|210 | 225 | 236 |
| E. coli MDS42-lacZ-1R-200Kb-2L | 200 | 211 | 226 | 237 |
| E. coli Syn61-1R-100Kbdif-2L | 201 | 212 | 227 | 238 |
| E. coli Syn61-1R-600Kbdif-2L | 202 | 213 | 228 | 239 |
| E. coli Syn61-1R-1Mbdif-2L | 203 | 214 | 229 | 240 |
| E. coli Syn61-1R-2Mbdif-2L Syn Seg. 1 | 204 | 215 | 230 | 241 |
| E. coli Syn61-1R-1Mb-2L Syn Seg. 2 | 205 | 216 | 231 | 242 |
| E. coli Syn61-1R-1MboriC-2L Syn Seg. 3 | 206 | 217 | 232 | 243 |
| E. coli Syn61-1R-500Kb-2L Syn Seg. 4 | 207 | 218 | 230 | 241 |
| E. coli Syn61-1R-500Kb-2L Syn Seg. 5 | 208 | 219 | 207 | 218 |
| S. flexneri 2a-1R-1Mbdif-2L | 209 | 220 | 233 | 244 |
| E. coli MDS42-1R-1Mbdif-2L | 203 | 214 | 229 | 240 |
| E. coli MDS42-1RRB-100Kbdif-2LBL | 201 | 221 | 227 | 245 |
| E. coli Syn61-1luxA-100Kbdif-2luxA | 201 | 221 | 227 | 245 |
| E. coli Syn61-1luxA-1Mbdif-2luxA | 203 | 222 | 229 | 246 |
| E. coli Syn61-1luxA-2Mbdif-2luxA | 204 | 215 | 230 | 241 |

TABLE 6A
ACE crRNA related sequences

| | | | | | Forward | Reverse |
|---|---|---|---|---|---|---|
| | | | | | Primer | Primer |
| | | | | | (SEQ | (SEQ |
| Target | | | | | ID | ID |
| Site | crRNA | PAM | Strand | Species/Strain | NO:) | NO:) |
| TS1 | accagacccgcgagcattaattcttgcctoca | cc | + | E. coli DH10B, E. coli | 279 | 311 |
| | SEQ ID NO: 247) | | | DH10B Δdif::lux | | |
| TS2 | ttagcggaatgctggtacgggctgataaagaa | cc | − | E. coli DH10B | 280 | 312 |
| (luxA1) | (SEQ ID NO: 248) | | | Δdif::lux | | |
| TS3 | agctgcaacaatgttgaaaatgccagccaact | cc | + | E. coli DHIOB, E. coli | 281 | 313 |
| | (SEQ ID NO: 249) | | | DH10B Δdif::lux | | |
| NT | GTTGTCTGACACTTGTCACAA | n/a | n/a | n/a | 282 | 314 |
| | ACCGCTAGGAG (SEQ ID NO: | | | | | |
| | 250) | | | | | |
| luxA* | catattcttgagccacttcattataaagctca | cc | + | E. coli DH10B | 283 | 315 |
| | (SEQ ID NO: 251) | | | Δdif::lux | | |
| luxB1 | gcatagcggaggaagcttgcttattggatcag | cc | − | E. coli DH10B | 284 | 316 |
| | (SEQ ID NO: 252) | | | Δdif::lux | | |
| luxB2 | cacttaaagatgagaggaataccttttttggc | cc | + | E. coli DH10B | 285 | 317 |
| | (SEQ ID NO: 253) | | | Δdif::lux | | |
| dif | ttgttaatgagcatgacaatcatgaccgccaa | ca | − | E. coli DH10B, E. coli | 286 | 318 |
| | (SEQ ID NO: 254) | | | MDS42 | | |
| glmS | gtgctaaaggggaccgacgttgaccagcctcg | cc | − | P. putida | 287 | 319 |
| | (SEQ ID NO: 255) | | | | | |
| wbfF | aaaaccatgcaggcagttaaagacatcacgca | cc | + | V. natriegens | 288 | 320 |
| | (SEQ ID NO: 256) | | | | | |
| chr.1 | tttaaagaagcaaaagccaaatacggtgtaat | cc | + | V. natriegens | 289 | 321 |
| dif | (SEQ ID NO: 257) | | | | | |
| chr.2 | acaaatttaaaatctgagagggataggagact | cc | − | V. natriegens | 290 | 322 |
| dif | (SEQ ID NO: 258) | | | | | |
| flaA | atgctttacacggaaggtacaccgggcacgat | cc | − | A. tumefaciens | 291 | 323 |
| | (SEQ ID NO: 259) | | | | | |
| agpI | gttgcgagcggcattatcgcgatgcgggtttc | cc | − | A. tumefaciens | 292 | 324 |
| | (SEQ ID NO: 260) | | | | | |
| dif | aaagtgaagccattgaaatcattggcatgtcg | cc | + | A. tumefaciens | 293 | 325 |
| (agro) | (SEQ ID NO: 261) | | | | | |
| tetA | gtcatgcaatttgtgttctcgccgatccttgg | cc | + | A. tumefaciens | 294 | 326 |
| (linear) | (SEQ ID NO: 262) | | | | | |
| TS4 | tggtggcggtggtgggagctattctcgttctg | cc | + | E. coli DH10B, E. coli | 295 | 327 |
| | (SEQ ID NO: 263) | | | DH10B Δdif::lux | | |
| TS5 | gaaaacacctgatatgaaaggcaatgccacca | cc | + | E. coli DHIOB, E. coli | 296 | 328 |
| | (SEQ ID NO: 264) | | | DH10B Δdif::lux | | |

TABLE 6B
OASIS crRNA related sequences

| | | | | Forward | Reverse |
|---|---|---|---|---|---|
| | | | | Primer | Primer |
| | | | | (SEQ ID | (SEQ ID |
| Target Site | crRNA | Strand | Species/Strain | NO:) | NO:) |
| 1500KbShigella- | ggtattcgatggggaa | + | S. flexneri | 297 | 329 |
| START | gaacttcacgcgagct | | CFS100 rpsL | | |
| | (SEQ ID NO: 265) | | K43R ΔrecA | | |
| | | | Δtus ΔoriT | | |
| | | | ΔhigB Ahok | | |
| 1500KbShigella- | aggagatggactactt | + | S. flexneri | 298 | 330 |
| STOP | catggaagtatttgtt | | CFS100 rpsL | | |
| | (SEQ ID NO: 266) | | K43R ΔrecA | | |
| | | | Δtus ΔoriT | | |
| | | | ΔhigB Δhok | | |
| orfamide-START | tggcggcctgtcagagc | + | P. protegens | 299 | 331 |
| | tacgtcaaagaaatc | | pf-5 | | |
| | (SEQ ID NO: 267) | | | | |
| orfamide-STOP | ttccatcgcgcgttcaa | + | P. protegens | 300 | 332 |
| | gaaatggaccggcga | | pf-5 | | |
| | (SEQ ID NO: 268) | | | | |
| rhizoxin-START | tggagtacgagacgttc | + | P. protegens | 301 | 333 |
| | atgctgtcgcgttga | | pf-5 | | |
| | (SEQ ID NO: 269) | | | | |
| rhizoxin-STOP | gttgcgacgcttagcag | + | P. protegens | 302 | 334 |
| | ctctcaagcaagagg | | pf-5 | | |
| | (SEQ ID NO: 270) | | | | |
| pyrrolnitrin- | gatcaagagcaagttcg | + | P. protegens | 303 | 335 |
| START | gctatcacctggtgc | | pf-5 | | |
| | (SEQ ID NO: 271) | | | | |
| pyrrolnitrin- | tgctgggaggtttctac | + | P. protegens | 304 | 336 |
| STOP | ctgttgtggttgctg | | pf-5 | | |
| | (SEQ ID NO: 272) | | | | |
| pyoluteorin- | ttcaggccggcaagct | + | P. protegens | 305 | 337 |
| START | ccacaaggtcatcact | | pf-5 | | |
| | (SEQ ID NO: 273) | | | | |
| pyoluteorin- | gatcaaccgctgatca | + | P. protegens | 306 | 338 |
| STOP | gcggttgcctgtgttg | | pf-5 | | |
| | (SEQ ID NO: 274) | | | | |
| pyoverdine- | aacaagaactacccca | + | P. protegens | 307 | 339 |
| START | acgaggaacggatcaa | | pf-5 | | |
| | (SEQ ID NO: 275) | | | | |
| pyoverdine- | tgggcctgaaaagaaa | + | P. protegens | 308 | 340 |
| STOP | gctcggcatgtacaag | | pf-5 | | |
| | SEQ ID NO: 276) | | | | |
| citronellol- | ttcggaccatgcgccg | + | P. protegens | 309 | 341 |
| START | atctggctcgaactgg | | pf-5 | | |
| | (SEQ ID NO: 277) | | | | |
| citronellol- | atcacctgcctggtgg | + | P. protegens | 310 | 342 |
| STOP | cctttgcggtgttcca | | pf-5 | | |
| | (SEQ ID NO: 278) | | | | |

TABLE 7A
ACE Transfers

| | | | | Genome Size |
|---|---|---|---|---|
| | | | Genome | (rounded) |
| Donor | Recipient | Chimera | Size (bp) | (Mb) |
| E. coli DH10B- | E. coli DH10B Δdif::lux | E. coli DH10B Δdif::lux | 4707021 | 4.71 |
| Syn100ΔlacZ-1R- | CAST-TS1 | TS1-Syn100-10Kb | | |
| 10Kb-2L | | | | |
| E. coli DH10B- | E. coli DH10B Δdif::lux | E. coli DH10B Δdif::lux | 4707021 | 4.71 |
| Syn100ΔlacZ-1R- | CAST-TS2 | TS2-Syn100-10Kb | | |
| 10Kb-2L | | | | |
| E. coli DH10B- | E. coli DH10B Δdif::lux | E. coli DH10B Δdif::lux | 4707021 | 4.71 |
| Syn100ΔlacZ-1R- | CAST-TS3 | TS3-Syn100-10Kb | | |
| 10Kb-2L | | | | |
| E. coli DH10B- | E. coli DH10B Δdif::lux | E. coli DH10B Δdif::lux | 4747023 | 4.75 |
| Syn100ΔlacZ-1R- | CAST-TS1 | TS1-Syn100-50Kb | | |
| 50Kb-2L | | | | |
| E. coli DH10B- | E. coli DH10B Δdif::lux | E. coli DH10B Δdif::lux | 4747023 | 4.75 |
| Syn100ΔlacZ-IR- | CAST-TS2 | TS2-Syn100-50Kb | | |
| 50Kb-2L | | | | |
| E. coli DH10B- | E. coli DH10B Δdif::lux | E. coli DH10B Δdif::lux | 4747023 | 4.75 |
| Syn100ΔlacZ-1R- | CAST-TS3 | TS3-Syn100-50Kb | | |
| 50Kb-2L | | | | |
| E. coli DH10B- | E. coli DH10B Δdif::lux | E. coli DH10B Δdif::lux | 4801035 | 4.8 |
| Syn100ΔlacZ-1R- | CAST-TS1 | TS1-Syn100-100Kb | | |
| 100Kb-2L | | | | |
| E. coli DH10B- | E. coli DH10B Δdif::lux | E. coli DH10B Δdif::lux | 4801035 | 4.8 |
| Syn100ΔlacZ-1R- | CAST-TS2 | TS2-Syn100-100Kb | | |
| 100Kb-2L | | | | |
| E. coli DH10B- | E. coli DH10B Δdif::lux | E. coli DH10B Δdif::lux | 4801035 | 4.8 |
| Syn100ΔlacZ-1R- | CAST-TS3 | TS3-Syn100-100Kb | | |
| 100Kb-2L | | | | |
| E. coli DH10B- | E. coli DH10B Δdif::lux | E. coli DH10B Δdif::lux | 4801035 | 14.8 |
| Syn100ΔlacZ-1R- | CAST-luxA* | luxA*-Syn100-100Kb | | |
| 100Kb-2L | | | | |
| E. coli DH10B- | E. coli DH10B Δdif::lux | E. coli DH10B Δdif::lux | 4801035 | 4.8 |
| Syn100ΔlacZ-1R- | CAST-luxB1 | luxBl-Syn100-100Kb | | |
| 100Kb-2L | | | | |
| E. coli DH10B- | E. coli DH10B Δdif::lux | E. coli DH10B Δdif::lux | 4801035 | 4.8 |
| Syn100ΔlacZ-1R- | CAST-luxB2 | luxB2-Syn100-100Kb | | |
| 100Kb-2L | | | | |
| E. coli MDS42-lacZ- | E. coli DH10B CAST-TSI | E. coli DH10B TS1- | 4900215 | 14.9 |
| 1R-200Kb-2L | | MDS42-lacZ-200Kb | | |
| E. coli Syn61-1R- | E. coli DH10B Δdif::lux | E. coli DH10B Δdif::lux | 4803858 | 4.8 |
| 100Kbdif-2L | CAST-TS1 | TS1-Syn61-100Kbdif | | |
| E. coli Syn61-1R- | E. coli DH10B Δdif::lux | E. coli DH10B Δdif::lux | 4803858 | 14.8 |
| 100Kbdif-2L | CAST-TS2 | TS2-Syn61-100Kbdif | | |
| E. coli Syn61-1R- | E. coli DH10B Δdif::lux | E. coli DH10B Δdif::lux | 4803858 | 4.8 |
| 100Kbdif-2L | CAST-TS3 | TS3-Syn61-100Kbdif | | |
| E. coli Syn61-1R- | E. coli DH10B Δdif::lux | E. coli DH10B Δdif::lux | 5289866 | 5.29 |
| 600Kbdif-2L | CAST-TS1 | TS1-Syn61-600Kbdif | | |
| E. coli Syn61-1R- | E. coli DH10B Δdif::lux | E. coli DH10B Δdif::lux | 5289866 | 5.29 |
| 600Kbdif-2L | CAST-TS2 | TS2-Syn61-600Kbdif | | |
| E. coli Syn61-1R- | E. coli DHIOB Δdif::lux | E. coli DH10B Δdif::lux | 5289866 | 5.29 |
| 600Kbdif-2L | CAST-TS3 | TS3-Syn61-600Kbdif | | |
| E. coli Syn61-1R- | E. coli DH10B Δdif::lux | E. coli DH10B Δdif::lux | 5630492 | 5.63 |
| 1Mbdif-2L | CAST-TS1 | TS1-Syn61-1Mbdif | | |
| E. coli Syn61-1R- | E. coli DH10B Δdif::lux | E. coli DH10B Δdif::lux | 5630492 | 5.63 |
| 1 Mbdif-2L | CAST-TS2 | TS2-Syn61-1Mbdif | | |
| E. coli Syn61-1R- | E. coli DH10B Δdif::lux | E. coli DH10B Δdif::lux | 5630492 | 5.63 |
| 1Mbdif-2L | CAST-TS3 | TS3-Syn61-1Mbdif | | |
| E. coli Syn61-1R- | E. coli DH10B Δdif::lux | E. coli DH10B Δdif::lux | 6609266 | 6.61 |
| 2Mbdif-2L Syn Seg. 1 | CAST-TS1 | TS1-Syn61-2Mbdif Syn | | |
| | | Seg. 1 | | |
| E. coli Syn61-1R- | E. coli DH10B Δdif::lux | E. coli DH10B Δdif::lux | 6609266 | 6.61 |
| 2Mbdif-2L Syn Seg. 1 | CAST-TS2 | TS2-Syn61-2Mbdif Syn | | |
| | | Seg. 1 | | |
| E. coli Syn61-1R- | E. coli DH10B Δdif::lux | E. coli DH10B Δdif::lux | 6609266 | 6.61 |
| 2Mbdif-2L Syn Seg. 1 | CAST-TS3 | TS3-Syn61-2Mbdif Syn | | |
| | | Seg. 1 | | |
| E. coli Syn61-1R- | E. coli DH10B Δdif::lux | E. coli DH10B Δdif::lux | 5756079 | 5.76 |
| 1Mb-2L Syn Seg. 2 | CAST-TS1 | TS1-Syn61-1Mb Syn | | |
| | | Seg. 2 | | |
| E. coli Syn61-1R- | E. coli DH10B Δdif::lux | E. coli DH10B Δdif::lux | 5756079 | 5.76 |
| 1Mb-2L Syn Seg. 2 | CAST-TS2 | TS2-Syn61-1Mb Syn | | |
| | | Seg. 2 | | |
| E. coli Syn61-1R- | E. coli DH10B Δdif::lux | E. coli DH10B Δdif::lux | 5756079 | 5.76 |
| 1Mb-2L Syn Seg. 2 | CAST-TS3 | TS3-Syn61-1Mb Syn | | |
| | | Seg. 2 | | |
| E. coli Syn61-1R- | E. coli DH10B CAST-TS3 | E. coli DH10B Δdif::lux | 5675263 | 5.68 |
| 1MboriC-2L Syn | | TS3-Syn61-1MboriC Syn | | |
| Seg. 3 | | Seg. 5 | | |
| E. coli Syn61-1R- | E. coli DH10B Δdif::lux | E. coli DH10B Δdif::lux | 5255474 | 5.26 |
| 500Kb-2L Syn Seg. 4 | CAST-TS1 | TS1-Syn61-500Kb Syn | | |
| | | Seg. 4 | | |
| E. coli Syn61-1R- | E. coli DH10B Δdif::lux | E. coli DH10B Δdif::lux | 5255474 | 5.26 |
| 500Kb-2L Syn Seg. 4 | CAST-TS2 | TS2-Syn61-500Kb Syn | | |
| | | Seg. 4 | | |
| E. coli Syn61-1R- | E. coli DH10B Δdif::lux | E. coli DH10B Δdif::lux | 5255474 | 5.26 |
| 500Kb-2L Syn Seg. 4 | CAST-TS3 | TS3-Syn61-500Kb Syn | | |
| | | Seg. 4 | | |
| E. coli Syn61-1R- | E. coli DH10B Δdif::lux | E. coli DH10B Δdif::lux | 5232612 | 5.23 |
| 500Kb-2L Syn Seg. 5 | CAST-TS1 | TS1-Syn61-500Kb Syn | | |
| | | Seg. 3 | | |
| E. coli Syn61-1R- | E. coli DH10B Δdif::lux | E. coli DH10B Δdif::lux | 5232612 | 5.23 |
| 500Kb-2L Syn Seg. 5 | CAST-TS2 | TS2-Syn61-500Kb Syn | | |
| | | Seg. 3 | | |
| E. coli Syn61-1R- | E. coli DH10B Δdif::lux | E. coli DH10B Δdif::lux | 5232612 | 5.23 |
| 500Kb-2L Syn Seg. 5 | CAST-TS3 | TS3-Syn61-500Kb Syn | | |
| | | Seg. 3 | | |
| S. flexneri 2a-1R- | E. coli DH10B CAST-dif | E. coli DH10B Δdif::S. | 5570081 | 5.57 |
| 1 Mbdif-2L | | flexneri-1Mbdif | | |
| S. flexneri 2a-1R- | E. coli MDS42 CAST-dif | E. coli MDS42 Δdif::S. | 4860139 | 4.86 |
| 1Mbdif-2L | | flexneri-1Mbdif | | |
| E. coli DH10B- | P. putida KT2440 CAST- | P. putida KT2440 | 6292437 | 6.29 |
| Syn100ΔlacZ-1R- | glmS | ΔglmS::Syn100-100Kb | | |
| 100Kb-2L | | | | |
| E. coli MDS42-lacZ- | V. natriegens DSM759 | V. natriegens DSM759 | 3462101 | 3.46 |
| 1R-200Kb-2L | CAST-wbfF | ΔglmS::MDS42-lacZ- | | |
| | | 200Kb | | |
| E. coli MDS42-1R- | V. natriegens DSM759 | V. natriegens DSM759 | 4117792 | 4.12 |
| 1 Mbdif-2L | CAST-difch1 | Δdifch1::MDS42-1Mbdif | | |
| E. coli MDS42-1R- | V. natriegens DSM759 | V. natriegens DSM759 | 2796899 | 2.8 |
| 1Mbdif-2L | CAST-difch2 | Δdifch2::MDS42-1Mbdif | | |
| E. coli Syn61-1R- | E. coli DH10B CAST-dif | E. coli DH10B Δdif::Syn. | 6601793 | 6.6 |
| 2Mbdif-2L Syn Seg. 1 | | Seg 1 | | |
| S. flexneri 2a-1R- | E. coli DH10B Δdif::Syn. | E. coli DH10B Δdif::Syn. | 7485737 | 7.49 |
| 1 Mbdif-2L | Seg 1 CAST-dif | Seg 1-S. flexneri-1Mbdif | | |
| E. coli Syn61-1R- | A. tumefaciens | A. tumefaciens | 2951828 | 2.95 |
| 100Kbdif-2L | spectVS1CAST-agpI | ΔagpI::Syn61-100Kbdif | | |
| E. coli MDS42- | A. tumefaciens | A. tumefaciens | 2952351 | 2.95 |
| 1RRB-100Kbdif- | spectVS1CAST-agpI | ΔagpI::MDS42-100Kbdif- | | |
| 2LBL (T-DNA) | | TDNA | | |
| E. coli MDS42- | A. tumefaciens | A. tumefaciens | 2952351 | 2.95 |
| 1RRB-100Kbdif- | spectVS1CAST-flaA | ΔflaA::MDS42-100Kbdif- | | |
| 2LBL (T-DNA) | | TDNA | | |
| E. coli MDS42- | A. tumefaciens | A. tumefaciens | 2186348 | 2.19 |
| 1RRB-100Kbdif- | spectVS1CAST-tetA | ΔtetA::MDS42-100Kbdif- | | |
| 2LBL (T-DNA) | | TDNA | | |
| E. coli MDS42- | A. tumefaciens | A. tumefaciens | 2952351 | 2.95 |
| 1RRB-100Kbdif- | spectVS1CAST-dif(agro) | Δdif::MDS42-100Kbdif- | | |
| 2LBL (T-DNA) | | TDNA | | |
| E. coli Syn61-1luxA- | E. coli DH10B Δdif::lux | E. coli DH10B Δdif::lux | 4803853 | 4.8 |
| 100Kbdif-2luxA | pKW20 | TS2-Syn61-100Kbdif | | |
| E. coli Syn61-1luxA- | E. coli DH10B Δdif::lux | E. coli DH10B Δdif::lux | 5630487 | 5.63 |
| 1Mbdif-2luxA | pKW20 | TS2-Syn61-1Mbdif | | |
| E. coli Syn61-1luxA- | E. coli DHIOB Δdif::lux | E. coli DH10B Δdif::lux | 6609261 | 6.61 |
| 2Mbdif-2luxA | pKW20 | TS2-Syn61-2Mbdif Syn | | |
| | | Seg. 1 | | |
| E. coli Syn61-1luxA- | E. coli DH10B Δdif::lux | E. coli DH10B Δdif::lux | 4803853 | 4.8 |
| 100Kbdif-2luxA | pKW20 sgRNA-luxA | TS2-Syn61-100Kbdif | | |
| E. coli Syn61-1luxA- | E. coli DH10B Δdif::lux | E. coli DH10B Δdif::lux | 5630487 | 5.63 |
| 1Mbdif-2luxA | pKW20 sgRNA-luxA | TS2-Syn61-1Mbdif | | |
| E. coli Syn61-1luxA- | E. coli DH10B Δdif::lux | E. coli DH10B Δdif::lux | 6609261 | 6.61 |
| 2Mbdif-2luxA | pKW20 sgRNA-luxA | TS2-Syn61-2Mbdif Syn | | |
| | | Seg. 1 | | |
| S. flexneri 2a-1R- | E. coli DH10B CAST-dif | E. coli DH10B Δdif::S. | 6149740 | 6.15 |
| 1500Kbdif-2L | | flexneri-1500Kbdif | | |
| P. protegens pf-5-1R- | E. coli DH10B Δdif::lux | E. coli DH10B Δdif::lux | 4774231 | 4.77 |
| orfamide-2L (80Kb) | hygroCDFCAST-TS2 | TS2-P. pro orf 80Kb | | |
| P. protegens pf-5-1R- | E. coli DH10B Δdif::lux | E. coli DH10B Δdif::lux | 4774231 | 4.77 |
| orfamide-2L (80Kb) | hygroCDFCAST-TS3 | TS3-P. pro orf 80Kb | | |
| P. protegens pf-5-1R- | E. coli DH10B Δdif::lux | E. coli DH10B Δdif::lux | 4833520 | 4.83 |
| rhizoxin-2L (140Kb) | hygroCDFCAST-TS2 | TS2-P. pro rhz 140Kb | | |
| P. protegens pf-5-1R- | E. coli DH10B Δdif::lux | E. coli DH10B Δdif::lux | 4833520 | 4.83 |
| rhizoxin-2L (140Kb) | hygroCDFCAST-TS3 | TS3-P. pro rhz 140Kb | | |
| P. protegens pf-5-1R- | E. coli DH10B Δdif::lux | E. coli DH10B Δdif::lux | 5108934 | 5.11 |
| pyoluteorin-rhizoxin- | hygroCDFCAST-TS2 | TS2-P. pro pyl-rhz 415Kb | | |
| 2L (415Kb) | | | | |
| P. protegens pf-5-1R- | E. coli DH10B | E. coli DH10B Δdif::P. pro | 5101461 | 5.1 |
| pyoluteorin-rhizoxin- | hygroCDFCAST-dif | pyl-rhz 415Kb | | |
| 2L (415Kb) | | | | |
| P. protegens pf-5-1R- | E. coli DH10B Δdif::lux | E. coli DH10B Δdif::lux | 4753426 | 4.75 |
| pyrrolnitrin-2L (60Kb) | hygroCDFCAST-TS3 | TS3-P. pro pyn 60Kb | | |
| P. protegens pf-5-1R- | E. coli DH10B Δdif::lux | E. coli DH10B Δdif::lux | 4759926 | 4.76 |
| pyoluteorin-2L (66Kb) | hygroCDFCAST-TS2 | TS2-P. pro pyl 66Kb | | |
| P. protegens pf-5-1R- | E. coli DH10B Δdif::lux | E. coli DH10B Δdif::lux | 4759926 | 4.76 |
| pyoluteorin-2L (66Kb) | hygroCDFCAST-TS3 | TS3-P. pro pyl 66Kb | | |
| P. protegens pf-5-1R- | E. coli DH10B | E. coli DH10B TS3-P. pro | 4931981 | 4.93 |
| pyoverdine-2L (246Kb) | hygroCDFCAST-TS3 | pyv 246Kb | | |
| P. protegens pf-5-1R- | E. coli DH10B | E. coli DH10B TS5-P. pro | 4931981 | 4.93 |
| pyoverdine-2L (246Kb) | hygroCDFCAST-TS5 | pyv 246Kb | | |
| P. protegens pf-5-1R- | E. coli DH10B | E. coli DH10B TS3-P. pro | 5059579 | 5.06 |
| citronellol- pyoverdine-2L | hygroCDFCAST-TS3 | cit-pyv 373Kb | | |
| (373Kb) | | | | |
| P. protegens pf-5-1R- | E. coli DH10B | E. coli DH10B TS3-P. pro | 5080897 | 5.08 |
| pyoverdine- citronellol-2L | hygroCDFCAST-TS3 | pyv-cit 395Kb | | |
| (395Kb) | | | | |
| P. protegens pf-5-1R- | E. coli DH10B | E. coli DH10B TS4-P. pro | 5080897 | 5.08 |
| pyoverdine- citronellol-2L | hygroCDFCAST-TS4 | pyv-cit 395Kb | | |
| (395Kb) | | | | |
| P. protegens pf-5-1R- | E. coli DH10B | E. coli DH10B Δdif::P. pro | 5080897 | 5.08 |
| pyoverdine- citronellol-2L | hygroCDFCAST-dif | pyv-cit 395Kb | | |
| (395Kb) | | | | |
| P. protegens pf-5-1R- | E. coli DH10B | E. coli DH10B TS3-P. pro | 5208495 | 5.21 |
| citronellol-2L (522Kb) | hygroCDFCAST-TS3 | cit 522Kb | | |
| P. protegens pf-5-1R- | E. coli DH10B | E. coli DH10B TS4-P. pro | 5208495 | 5.21 |
| citronellol-2L (522Kb) | hygroCDFCAST-TS4 | cit 522Kb | | |
| P. protegens pf-5-1R- | E. coli DH10B | E. coli DH10B Δdif::P. pro | 5208495 | 5.21 |
| citronellol-2L (522Kb) | hygroCDFCAST-dif | cit 522Kb | | |

TABLE 7B
ACE Transfers

| | | | | | | Solid Agar |
|---|---|---|---|---|---|---|
| | | | | | | Selection |
| Donor | Recipient | Chimera | Target | Target Sequence | PAM | Scheme |
| E. coli | E. coli DH10B | E. coli DH10B | TS1 | accagacccgcgagcatta | cc | hygromycin, |
| DH10B- | Δdif::lux | Δdif::lux TS1- | | attcttgcctcca (SEQ | | spectinomycin, |
| Syn100ΔlacZ | CAST-TS1 | Syn100-10Kb | | ID NO: 247) | | sucrose |
| -1R-10Kb- | | | | | | |
| 2L | | | | | | |
| E. coli | E. coli DH10B | E. coli DH10B | TS2 | ttagcggaatgctggtacgg | cc | hygromycin, |
| DH10B- | Δdif::lux | Δdif::lux TS2- | | gctgataaagaa (SEQ | | spectinomycin, |
| Syn100ΔlacZ | CAST-TS2 | Syn100-10Kb | | ID NO: 248) | | sucrose |
| -1R-10Kb- | | | | | | |
| 2L | | | | | | |
| E. coli | E. coli DH10B | E. coli DH10B | TS3 | agctgcaacaatgttgaaaa | cc | hygromycin, |
| DH10B- | Δdif::lux | Δdif::lux TS3- | | tgccagccaact (SEQ | | spectinomycin, |
| Syn100ΔlacZ | CAST-TS3 | Syn100-10Kb | | ID NO: 249) | | sucrose |
| -1R-10Kb- | | | | | | |
| 2L | | | | | | |
| E. coli | E. coli DH10B | E. coli DH10B | ITS1 | accagacccgcgagcatta | cc | hygromycin, |
| DH10B- | Δdif::lux | Δdif::lux TS1- | | attcttgcctcca (SEQ | | spectinomycin, |
| Syn100ΔlacZ | CAST-TS1 | Syn100-50Kb | | ID NO: 247) | | sucrose |
| -1R-50Kb- | | | | | | |
| 2L | | | | | | |
| E. coli | E. coli DH10B | E. coli DH10B | TS2 | ttagcggaatgctggtacgg | cc | hygromycin, |
| DH10B- | Δdif::lux | Δdif::lux TS2- | | gctgataaagaa (SEQ | | spectinomycin, |
| Syn100ΔlacZ | CAST-TS2 | Syn100-50Kb | | ID NO: 248) | | sucrose |
| -1R-50Kb- | | | | | | |
| 2L | | | | | | |
| E. coli | E. coli DH10B | E. coli DH10B | TS3 | agctgcaacaatgttgaaaa | cc | hygromycin, |
| DH10B- | Δdif::lux | Δdif::lux TS3- | | tgccagccaact (SEQ | | spectinomycin, |
| Syn100ΔlacZ | CAST-TS3 | Syn100-50Kb | | ID NO: 249) | | sucrose |
| -1R-50Kb- | | | | | | |
| 2L | | | | | | |
| E. coli | E. coli DH10B | E. coli DH10B | TS1 | accagacccgcgagcatta | cc | hygromycin, |
| DH10B- | Δdif::lux | Δdif::lux TS1- | | attcttgcctcca (SEQ | | spectinomycin, |
| Syn100ΔlacZ | CAST-TS1 | Syn100-100Kb | | ID NO: 247) | | sucrose |
| -1R-100Kb- | | | | | | |
| 2L | | | | | | |
| E. coli | E. coli DH10B | E. coli DH10B | TS2 | ttagcggaatgctggtacgg | cc | hygromycin, |
| DH10B- | Δdif::lux | Δdif::lux TS2- | | gctgataaagaa (SEQ | | spectinomycin, |
| Syn100ΔlacZ | CAST-TS2 | Syn100-100Kb | | ID NO: 248) | | sucrose |
| -1R-100Kb- | | | | | | |
| 2L | | | | | | |
| E. coli | E. coli DH10B | E. coli DH10B | TS3 | agctgcaacaatgttgaaaa | cc | hygromycin, |
| DH10B- | Δdif::lux | Δdif::lux TS3- | | tgccagccaact (SEQ | | spectinomycin, |
| Syn100ΔlacZ | CAST-TS3 | Syn100-100Kb | | ID NO: 249) | | sucrose |
| -1R-100Kb- | | | | | | |
| 2L | | | | | | |
| E. coli | E. coli DH10B | E. coli DH10B | luxA* | catattcttgagccacttca | cc | hygromycin, |
| DH10B- | Δdif::lux | Δdif::lux luxA*- | | ttataaagctca (SEQ ID | | spectinomycin, |
| Syn100ΔlacZ | CAST-luxA* | Syn100-100Kb | | NO: 251) | | sucrose |
| -1R-100Kb- | | | | | | |
| 2L | | | | | | |
| E. coli | E. coli DH10B | E. coli DH10B | luxB1 | gcatagcggaggaagcttg | cc | hygromycin, |
| DH10B- | Δdif::lux | Δdif::lux luxB1- | | cttattggatcag (SEQ | | spectinomycin, |
| Syn100ΔlacZ | CAST-luxB1 | Syn100-100Kb | | ID NO: 252) | | sucrose |
| -1R-100Kb- | | | | | | |
| 2L | | | | | | |
| E. coli DHIOB- | E. coli DH10B | E. coli DH10B | luxB2 | cacttaaagatgagaggaat | cc | hygromycin, |
| Syn100ΔlacZ | Δdif::lux | Δdif::lux luxB2- | | accttttttggc (SEQ ID | | spectinomycin, |
| -1R-100Kb-2L | CAST-luxB2 | Syn100-100Kb | | NO: 253) | | sucrose |
| E. coli | E. coli DH10B | E. coli DH10B | TS1 | accagacccgcgagcatta | cc | hygromycin, |
| MDS42- | CAST-TS1 | TS1-MDS42- | | attcttgcctcca (SEQ | | spectinomycin, |
| lacZ-1R- | | lacZ-200Kb | | ID NO: 247) | | sucrose |
| 200Kb-2L | | | | | | |
| E. coli | CAST-TS1 | E. coli DH10B | TS1 | accagacccgcgagcatta | cc | hygromycin, |
| Syn61-1R- | E. coli DH10B | Δdif::lux TS1- | | attcttgcctcca (SEQ | | spectinomycin, |
| 100Kbdif-2L | Δdif::lux | Syn61-100Kbdif | | ID NO: 247) | | sucrose |
| E. coli | CAST-TS2 | E. coli DH10B | TS2 | ttagcggaatgctggtacgg | cc | hygromycin, |
| Syn61-1R- | E. coli DH10B | Δdif::lux TS2- | | gctgataaagaa (SEQ | | spectinomycin, |
| 100Kbdif-2L | Δdif::lux | Syn61-100Kbdif | | ID NO: 248) | | sucrose |
| E. coli | E. coli DH10B | E. coli DH10B | TS3 | agctgcaacaatgttgaaaa | cc | hygromycin, |
| Syn61-1R- | Δdif::lux | Δdif::lux TS3- | | tgccagccaact (SEQ | | spectinomycin, |
| 100Kbdif-2L | CAST-TS3 | Syn61-100Kbdif | | ID NO: 249) | | sucrose |
| E. coli | CAST-TS1 | E. coli DH10B | TS1 | accagacccgcgagcatta | cc | hygromycin, |
| Syn61-1R- | E. coli DH10B | Δdif::lux TS1- | | attcttgcctcca (SEQ | | spectinomycin, |
| 600Kbdif-2L | Δdif::lux | Syn61-600Kbdif | | ID NO: 247) | | sucrose |
| E. coli | CAST-TS2 | E. coli DH10B | TS2 | ttagcggaatgctggtacgg | cc | hygromycin, |
| Syn61-1R- | E. coli DH10B | Δdif::lux TS2- | | gctgataaagaa (SEQ | | spectinomycin, |
| 600Kbdif-2L | Δdif::lux | Syn61-600Kbdif | | ID NO: 248) | | sucrose |
| E. coli | E. coli DH10B | E. coli DH10B | TS3 | agctgcaacaatgttgaaaa | cc | hygromycin, |
| Syn61-1R- | Δdif::lux | Δdif::lux TS3- | | tgccagccaact (SEQ | | spectinomycin, |
| 600Kbdif-2L | CAST-TS3 | Syn61-600Kbdif | | ID NO: 249) | | sucrose |
| E. coli | E. coli DH10B | E. coli DH10B | TS1 | accagacccgcgagcatta | cc | hygromycin, |
| Syn61-1R- | Δdif::lux | Δdif::lux TS1- | | attcttgcctcca (SEQ | | spectinomycin, |
| 1Mbdif-2L | CAST-TS1 | Syn61-1Mbdif | | ID NO: 247) | | sucrose |
| E. coli | E. coli DH10B | E. coli DH10B | TS2 | ttagcggaatgctggtacgg | cc | hygromycin, |
| Syn61-1R- | Δdif::lux | Δdif::lux TS2- | | gctgataaagaa (SEQ | | spectinomycin, |
| 1 Mbdif-2L | CAST-TS2 | Syn61-1Mbdif | | ID NO: 248) | | sucrose |
| E. coli | E. coli DH10B | E. coli DH10B | TS3 | agctgcaacaatgttgaaaa | cc | hygromycin, |
| Syn61-1R- | Δdif::lux | Δdif::lux TS3- | | tgccagccaact (SEQ | | spectinomycin, |
| 1 Mbdif-2L | CAST-TS3 | Syn61-1Mbdif | | ID NO: 249) | | sucrose |
| E. coli | E. coli DH10B | E. coli DH10B | TS1 | accagacccgcgagcatta | cc | hygromycin, |
| Syn61-1R- | Δdif::lux | Δdif::lux TS1- | | attcttgcctcca (SEQ | | spectinomycin, |
| 2Mbdif-2L | CAST-TS1 | Syn61-2Mbdif | | ID NO: 247) | | sucrose |
| Syn Seg. 1 | | Syn Seg. 1 | | | | |
| E. coli | E. coli DH10B | E. coli DH10B | TS2 | ttagcggaatgctggtacgg | cc | hygromycin, |
| Syn61-1R- | Δdif::lux | Δdif::lux TS2- | | gctgataaagaa (SEQ | | spectinomycin, |
| 2Mbdif-2L | CAST-TS2 | Syn61-2Mbdif | | ID NO: 248) | | sucrose |
| Syn Seg. 1 | | Syn Seg. 1 | | | | |
| E. coli | E. coli DH10B | E. coli DH10B | TS3 | agctgcaacaatgttgaaaa | cc | hygromycin, |
| Syn61-1R- | Δdif::lux | Δdif::lux TS3- | | tgccagccaact (SEQ | | spectinomycin, |
| 2Mbdif-2L | CAST-TS3 | Syn61-2Mbdif | | ID NO: 249) | | sucrose |
| Syn Seg. 1 | | Syn Seg. 1 | | | | |
| E. coli | E. coli DH10B | E. coli DH10B | TS1 | accagacccgcgagcatta | cc | hygromycin, |
| Syn61-1R- | Δdif::lux | Δdif::lux TS1- | | attcttgcctcca (SEQ | | spectinomycin, |
| 1 Mb-2L Syn | CAST-TS1 | Syn61-1Mb Syn | | ID NO: 247) | | sucrose |
| Seg. 2 | | Seg. 2 | | | | |
| E. coli | E. coli DH10B | E. coli DH10B | TS2 | ttagcggaatgctggtacgg | cc | hygromycin, |
| Syn61-1R- | Δdif::lux | Δdif::lux TS2- | | gctgataaagaa (SEQ | | spectinomycin, |
| 1Mb-2L Syn | CAST-TS2 | Syn61-1Mb Syn | | ID NO: 248) | | sucrose |
| Seg. 2 | | Seg. 2 | | | | |
| E. coli | E. coli DH10B | E. coli DH10B | TS3 | agctgcaacaatgttgaaaa | cc | hygromycin, |
| Syn61-1R- | Δdif: lux | Δdif::lux TS3- | | tgccagccaact (SEQ | | spectinomycin, |
| 1Mb-2L Syn | CAST-TS3 | Syn61-1Mb Syn | | ID NO: 249) | | sucrose |
| Seg. 2 | | Seg. 2 | | | | |
| E. coli | E. coli DH10B | E. coli DH10B | TS3 | agctgcaacaatgttgaaaa | cc | hygromycin, |
| Syn61-1R- | CAST-TS3 | Δdif::lux TS3- | | tgccagccaact (SEQ | | spectinomycin, |
| 1MboriC-2L | | Syn61-1MboriC | | ID NO: 249) | | sucrose |
| Syn Seg. 3 | | Syn Seg. 5 | | | | |
| E. coli | E. coli DH10B | E. coli DH10B | TS1 | accagacccgcgagcatta | cc | hygromycin, |
| Syn61-1R- | Δdif::lux | Δdif::lux TS1- | | attcttgcctcca (SEQ | | spectinomycin, |
| 500Kb-2L | CAST-TS1 | Syn61-500Kb | | ID NO: 247) | | sucrose |
| Syn Seg. 4 | | Syn Seg. 4 | | | | |
| E. coli | E. coli DH10B | E. coli DH10B | TS2 | ttagcggaatgctggtacgg | cc | hygromycin, |
| Syn61-1R- | Δdif::lux | Δdif::lux TS2- | | gctgataaagaa (SEQ | | spectinomycin, |
| | CAST-TS2 | | | ID NO: 248) | | sucrose |
| 500Kb-2L | | Syn61-500Kb | | | | |
| Syn Seg. 4 | | Syn Seg. 4 | | | | |
| E. coli | E. coli DH10B | E. coli DH10B | TS3 | agctgcaacaatgttgaaaa | cc | hygromycin, |
| Syn61-1R- | Δdif::lux | Δdif::lux TS3- | | tgccagccaact (SEQ | | spectinomycin, |
| 500Kb-2L | CAST-TS3 | Syn61-500Kb | | ID NO: 249) | | sucrose |
| Syn Seg. 4 | | Syn Seg. 4 | | | | |
| E. coli | E. coli DH10B | E. coli DH10B | TS1 | accagacccgcgagcatta | cc | hygromycin, |
| Syn61-1R- | Δdif::lux | Δdif::lux TS1- | | attcttgcctcca (SEQ | | spectinomycin, |
| 500Kb-2L | CAST-TS1 | Syn61-500Kb | | ID NO: 247) | | sucrose |
| Syn Seg. 5 | | Syn Seg. 3 | | | | |
| E. coli | E. coli DH10B | E. coli DH10B | TS2 | ttagcggaatgctggtacgg | cc | hygromycin, |
| Syn61-1R- | Δdif::lux | Δdif::lux TS2- | | gctgataaagaa (SEQ | | spectinomycin, |
| 500Kb-2L | CAST-TS2 | Syn61-500Kb | | ID NO: 248) | | sucrose |
| Syn Seg. 5 | | Syn Seg. 3 | | | | |
| E. coli | E. coli DH10B | E. coli DH10B | TS3 | agctgcaacaatgttgaaaa | cc | hygromycin, |
| Syn61-1R- | Δdif::lux | Δdif::lux TS3- | | tgccagccaact (SEQ | | spectinomycin, |
| 500Kb-2L | CAST-TS3 | Syn61-500Kb | | ID NO: 249) | | sucrose |
| Syn Seg. 5 | | Syn Seg. 3 | | | | |
| S. flexneri | E. coli DH10B | E. coli DH10B | dif | ttgttaatgagcatgacaatc | ca | hygromycin, |
| 2a-1R- | CAST-dif | Δdif::S. flexneri- | | atgaccgccaa (SEQ | | spectinomycin, |
| 1Mbdif-2L | | 1Mbdif | | ID NO: 254) | | sucrose |
| S. flexneri | E. coli MDS42 | E. coli MDS42 | dif | ttgttaatgagcatgacaatc | ca | hygromycin, |
| 2a-1R- | CAST-dif | Δdif::S. flexneri- | | atgaccgccaa (SEQ | | spectinomycin, |
| 1 Mbdif-2L | | 1 Mbdif | | ID NO: 254) | | sucrose |
| E. coli | P. putida | KT2440 | glmS | gtgctaaaggggaccgac | cc | hygromycin, |
| DH10B- | KT2440 CAST- | P. putida | | gttgaccagcctcg (SEQ | | kanamycin, |
| Syn100ΔlacZ | glmS | ΔglmS::Syn100- | | ID NO: 255) | | sucrose |
| 1R-100Kb- | | 100Kb | | | | |
| 2L | | | | | | |
| E. coli | V. natriegens | V. natriegens | wbfF | aaaaccatgcaggcagtta | cc | hygromycin, |
| MDS42- | DSM759 | DSM759 | | aagacatcacgca (SEQ | | carbenicillin, |
| lacZ-1R- | CAST-wbfF | ΔglmS::MDS42- | | ID NO: 256) | | sucrose |
| 200Kb-2L | | lacZ-200Kb | | | | |
| E. coli | V. natriegens | V. natriegens | chr. 1 | tttaaagaagcaaaagcca | cc | hygromycin, |
| MDS42-1R- | DSM759 | DSM759 | dif | aatacggtgtaat (SEQ | | carbenicillin, |
| 1 Mbdif-2L | CAST-difchl | Δdifch1::MDS4 | | ID NO: 257) | | sucrose |
| | | 2-1Mbdif | | | | |
| E. coli | V. natriegens | V. natriegens | chr. 2 | acaaatttaaaatctgagag | cc | hygromycin, |
| MDS42-1R- | DSM759 | DSM759 | dif | ggataggagact (SEQ | | carbenicillin, |
| 1Mbdif-2L | CAST-difch2 | Δdifch2::MDS4 | | ID NO: 258) | | sucrose |
| | | 2-1Mbdif | | | | |
| E. coli | E. coli DH10B | E. coli DH10B | dif | ttgttaatgagcatgacaatc | ca | hygromycin, |
| Syn61-1R- | CAST-dif | Δdif::Syn. Seg 1 | | atgaccgccaa (SEQ | | spectinomycin, |
| 2Mbdif-2L | | | | ID NO: 254) | | sucrose |
| Syn Seg. 1 | | | | | | |
| S. flexneri | E. coli DH10B | Δdif::Syn. Seg | dif | ttgttaatgagcatgacaatc | ca | hygromycin, |
| 2a-1R- | Δdif::Syn. Seg 1 | E. coli DH10B | | atgaccgccaa (SEQ | | spectinomycin, |
| 1Mbdif-2L | CAST-dif | 1-S. flexneri- | | ID NO: 254) | | sucrose |
| | | 1 Mbdif | | | | |
| E. coli | A. tumefaciens | A. tumefaciens | agpI | gttgcgagcggcattatcgc | cc | hygromycin, |
| Syn61-1R- | spectVSICAST | ΔagpI::Syn61- | | gatgcgggtttc (SEQ | | gentamcin, |
| 100Kbdif-2L | -agpI | 100Kbdif | | ID NO: 260) | | spectinomycin, |
| | | | | | | sucrose |
| E. coli | A. tumefaciens | A. tumefaciens | agpI | gttgcgagcggcattatcgc | cc | kanamycin, |
| MDS42- | spectVSICAST | ΔagpI::MDS42- | | gatgcgggtttc (SEQ | | gentamicin, |
| 1RRB- | -agpI | | | ID NO: 260) | | |
| 100Kbdif- | | 100Kbdif- | | | | spectinomycin, |
| 2LBL (T- | | TDNA | | | | sucrose |
| DNA) | | | | | | |
| E. coli | A. tumefaciens | A. tumefaciens | flaA | atgctttacacggaaggtac | cc | kanamycin, |
| MDS42- | spectVSICAST | ΔflaA::MDS42- | | accgggcacgat (SEQ | | gentamicin, |
| 1RRB- | -flaA | 100Kbdif-TDNA | | ID NO: 259) | | spectinomycin, |
| 100Kbdif- | | | | | | sucrose |
| 2LBL (T- | | | | | | |
| DNA) | | | | | | |
| E. coli | A. tumefaciens | A. tumefaciens | tetA | aaagtgaagccattgaaatc | cc | kanamycin, |
| MDS42- | spectVSICAST | ΔtetA::MDS42- | | attggcatgtcg (SEQ | | gentamicin, |
| 1RRB- | -tetA | 100Kbdif-TDNA | | ID NO: 261) | | spectinomycin, |
| 100Kbdif- | | | | | | sucrose |
| 2LBL (T- | | | | | | |
| DNA) | | | | | | |
| E. coli | A. tumefaciens | A. tumefaciens | dif | gtcatgcaatttgtgttctcg | cc | kanamycin, |
| MDS42- | spectVS1CAST | Δdif::MDS42- | (agro) | ccgatccttgg (SEQ ID | | gentamicin, |
| 1RRB- | -dif(agro) | 100Kbdif-TDNA | | NO: 262) | | spectinomycin, |
| 100Kbdif- | | | | | | sucrose |
| 2LBL (T- | | | | | | |
| DNA) | | | | | | |
| E. coli | E. coli DH10B | E. coli DH10B | TS2 | N/A | V/A | hygromycin, |
| Syn61- | Δdif::lux | Δdif::lux TS2- | (luxA) | | | tetracycline, |
| 1luxA- | pKW20 | Syn61-100Kbdif | | | | sucrose |
| 100Kbdif- | | | | | | |
| 2luxA | | | | | | |
| E. coli | E. coli DH10B | E. coli DH10B | TS2 | N/A | N/A | hygromycin, |
| Syn61- | Δdif::lux | Δdif::lux TS2- | (luxA) | | | tetracycline, |
| 1luxA- | pKW20 | Syn61-1Mbdif | | | | sucrose |
| 1 Mbdif- | | | | | | |
| 2luxA | | | | | | |
| E. coli | E. coli DH10B | E. coli DH10B | TS2 | N/A | N/A | hygromycin, |
| Syn61- | Δdif::lux | Δdif::lux TS2- | (luxA) | | | tetracycline, |
| 1luxA- | pKW20 | Syn61-2Mbdif | | | | sucrose |
| 2Mbdif- | | Syn Seg. 1 | | | | |
| 2luxA | | | | | | |
| E. coli | E. coli DH10B | E. coli DH10B | TS2 | N/A | N/A | hygromycin, |
| Syn61- | Δdif::lux | Δdif::lux TS2- | (luxA) | | | tetracycline, |
| 1luxA- | pKW20 | Syn61-100Kbdif | | | | carbenicillin, |
| 100Kbdif- | sgRNA-luxA | | | | | sucrose |
| 2luxA | | | | | | |
| E. coli | E. coli DH10B | E. coli DH10B | TS2 | N/A | N/A | hygromycin, |
| Syn61- | Δdif::lux | Δdif::lux TS2- | (luxA) | | | tetracycline, |
| 1luxA- | pKW20 | Syn61-1Mbdif | | | | carbenicillin, |
| 1 Mbdif- | sgRNA-luxA | | | | | sucrose |
| 2luxA | | | | | | |
| E. coli | E. coli DH10B | E. coli DH10B | TS2 | N/A | N/A | hygromycin, |
| Syn61- | Δdif::lux | Δdif::lux TS2- | (luxA) | | | tetracycline, |
| 1luxA- | pKW20 | Syn61-2Mbdif | | | | carbenicillin, |
| 2Mbdif- | sgRNA-luxA | Syn Seg. 1 | | | | sucrose |
| 2luxA | | | | | | |
| S. flexneri | E. coli DH10B | E. coli DH10B | dif | ttgttaatgagcatgacaatc | ca | kanamycin, |
| 2a-1R- | CAST-dif | Δdif:: | | tatgaccgccaa (SEQ | | hygromycin |
| 1500Kbdif- | | S. flexneri- | | ID NO: 254) | | |
| 2L | | 1500Kbdif | | | | |
| P. protegens | E. coli DH10B | E. coli DH10B | TS2 | ttagcggaatgctggtacgg | cc | kanamycin, |
| pf-5-1R- | hygroCDFCAS | Δdif::lux TS2-P. | | gctgataaagaa (SEQ | | hygromycin |
| orfamide-2L | Δdif::lux | pro orf 80Kb | | ID NO: 248) | | |
| (80 Kb) | T-TS2 | | | | | |
| P. protegens | E. coli DH10B | E. coli DH10B | TS3 | agctgcaacaatgttgaaaa | cc | kanamycin, |
| pf-5-1R- | hygroCDFCAS | Δdif::lux TS3-P. | | tgccagccaact (SEQ | | hygromycin |
| orfamide-2L | Δdif::lux | pro orf 80Kb | | ID NO: 249) | | |
| (80 Kb) | T-TS3 | | | | | |
| P. protegens | E. coli DH10B | E. coli DH10B | TS2 | ttagcggaatgctggtacgg | cc | kanamycin, |
| pf-5-1R- | Δdif::lux | Δdif::lux TS2-P. | | gctgataaagaa (SEQ | | hygromycin |
| rhizoxin-2L | hygroCDFCAS | pro rhz 140Kb | | ID NO: 248) | | |
| (140 Kb) | T-TS2 | | | | | |
| P. protegens | E. coli DH10B | E. coli DH10B | TS3 | agctgcaacaatgttgaaaa | cc | kanamycin, |
| pf-5-1R- | Δdif::lux | Δdif::lux TS3-P. | | tgccagccaact (SEQ | | hygromycin |
| rhizoxin-2L | hygroCDFCAS | pro rhz 140Kb | | ID NO: 249) | | |
| (140 Kb) | T-TS3 | | | | | |
| P. protegens | E. coli DH10B | E. coli DH10B | TS2 | ttagcggaatgctggtacgg | cc | kanamycin, |
| pf-5-1R- | Δdif::lux | Δdif::lux TS2-P. | | gctgataaagaa (SEQ | | hygromycin |
| pyoluteorin- | hygroCDFCAS | pro pyl-rhz | | ID NO: 248) | | |
| rhizoxin-2L | T-TS2 | 415Kb | | | | |
| (415 Kb) | | | | | | |
| P. protegens | E. coli DH10B | E. coli DH10B | dif | ttgttaatgagcatgacaatc | ca | kanamycin, |
| pf-5-1R- | hygroCDFCAS | Δdif::P. pro pyl- | | atgaccgccaa (SEQ | | hygromycin |
| pyoluteorin- | T-dif | rhz 415Kb | | ID NO: 254) | | |
| rhizoxin-2L | | | | | | |
| (415 Kb) | | | | | | |
| P. protegens | E. coli DH10B | E. coli DH10B | TS3 | agctgcaacaatgttgaaaa | cc | kanamycin, |
| pf-5-1R- | hygroCDFCAS | Δdif::lux TS3-P. | | tgccagccaact (SEQ | | hygromycin |
| pyrrolnitrin- | Δdif::lux | pro pyn 60Kb | | ID NO: 249) | | |
| 2L (60 Kb) | T-TS3 | | | | | |
| P. protegens | E. coli DH10B | E. coli DH10B | TS2 | ttagcggaatgctggtacgg | cc | kanamycin, |
| pf-5-1R- | hygroCDFCAS | Δdif::lux TS2-P. | | gctgataaagaa (SEQ | | hygromycin |
| pyoluteorin- | Δdif::lux | pro pyl 66Kb | | ID NO: 248) | | |
| 2L (66 Kb) | T-TS2 | | | | | |
| P. protegens | E. coli DH10B | E. coli DH10B | TS3 | agctgcaacaatgttgaaaa | cc | kanamycin, |
| pf-5-1R- | hygroCDFCAS | Δdif::lux TS3-P. | | tgccagccaact (SEQ | | hygromycin |
| pyoluteorin- | Δdif::lux | pro pyl 66Kb | | ID NO: 249) | | |
| 2L (66 Kb) | T-TS3 | | | | | |
| P. protegens | E. coli DH10B | E. coli DH10B | TS3 | agctgcaacaatgttgaaaa | cc | kanamycin, |
| pf-5-1R- | hygroCDFCAS | TS3-P. pro pyv | | tgccagccaact (SEQ | | hygromycin |
| pyoverdine- | T-TS3 | 246Kb | | ID NO: 249) | | |
| 2L (246 Kb) | | | | | | |
| P. protegens | E. coli DH10B | E. coli DH10B | TS5 | gaaaacacctgatatgaaa | Icc | kanamycin, |
| pf-5-1R- | hygroCDFCAS | TS5-P. pro pyv | | ggcaatgccacca (SEQ | | hygromycin |
| pyoverdine- | T-TS5 | 246Kb | | ID NO: 264) | | |
| 2L (246 Kb) | | | | | | |
| P. protegens | E. coli DH10B | E. coli DH10B | TS3 | agctgcaacaatgttgaaaa | cc | kanamycin, |
| pf-5-1R- | hygroCDFCAS | TS3-P. pro cit- | | tgccagccaact (SEQ | | hygromycin |
| citronellol- | T-TS3 | pyv 373Kb | | ID NO: 249) | | |
| pyoverdine- | | | | | | |
| 2L (373 Kb) | | | | | | |
| P. protegens | E. coli DH10B | E. coli DH10B | TS3 | agctgcaacaatgttgaaaa | cc | kanamycin, |
| pf-5-1R- | hygroCDFCAS | TS3-P. pro pyv- | | tgccagccaact (SEQ | | hygromycin |
| pyoverdine- | T-TS3 | cit 395Kb | | ID NO: 249) | | |
| citronellol- | | | | | | |
| 2L (395 Kb) | | | | | | |
| P. protegens | E. coli DH10B | E. coli DH10B | TS4 | tggtggcggtggtgggagc | cc | kanamycin, |
| pf-5-1R- | hygroCDFCAS | TS4-P. pro pyv- | | tattctcgttctg (SEQ ID | | hygromycin |
| pyoverdine- | T-TS4 | cit 395Kb | | NO: 263) | | |
| citronellol- | | | | | | |
| 2L (395 Kb) | | | | | | |
| P. protegens | E. coli DH10B | E. coli DH10B | dif | ttgttaatgagcatgacaatc | ca | kanamycin, |
| pf-5-1R- | hygroCDFCAS | Δdif::P. pro | | atgaccgccaa (SEQ | | hygromycin |
| pyoverdine- | IT-dif | pyv-cit 395Kb | | ID NO: 254) | | |
| citronellol- | | | | | | |
| 2L (395 Kb) | | | | | | |
| P. protegens | E. coli DH10B | E. coli DH10B | TS3 | agctgcaacaatgttgaaaa | cc | kanamycin, |
| pf-5-1R- | hygroCDFCAS | TS3-P. pro cit | | tgccagccaact (SEQ | | hygromycin |
| citronellol- | T-TS3 | 522Kb | | ID NO: 249) | | |
| 2L (522 Kb) | | | | | | |
| P. protegens | E. coli DH10B | E. coli DH10B | TS4 | tggtggcggtggtgggagc | cc | kanamycin, |
| pf-5-1R- | hygroCDFCAS | TS4-P. pro cit | | tattctcgttctg (SEQ ID | | hygromycin |
| citronellol- | T-TS4 | 522Kb | | NO: 263) | | |
| 2L (522 Kb) | | | | | | |
| P. protegens | E. coli DH10B | E. coli DH10B | dif | ttgttaatgagcatgacaatc | ca | kanamycin, |
| pf-5-1R- | hygroCDFCAS | Δdif::P. pro cit | | atgaccgccaa (SEQ | | hygromycin |
| citronellol- | T-dif | 522Kb | | ID NO: 254) | | |
| 2L (522 Kb) | | | | | | |

TABLE 8
Chimeric Genomes*

| | Genome Size | | TE Insert |
|---|---|---|---|
| Chimeric Strain | (bp) | Stability | orientation |
| E. coli DH10B Δdif::lux TS1-Syn100-10Kb | 4707021 | Stable | RL |
| E. coli DH10B Δdif::lux TS2-Syn100-10Kb | 4707021 | Stable | RL |
| E. coli DH10B Δdif::lux TS3-Syn100-10Kb | 4707021 | Stable | RL |
| E. coli DH10B Δdif::lux TS1-Syn100-50Kb | 4747023 | Stable | RL |
| E. coli DH10B Δdif::lux TS2-Syn100-50Kb | 4747023 | Stable | RL |
| E. coli DH10B Δdif::lux TS3-Syn100-50Kb | 4747023 | Stable | RL |
| E. coli DH10B Δdif::lux TS1-Syn100-100Kb | 4801035 | Stable | RL |
| E. coli DH10B Δdif::lux TS2-Syn100-100Kb | 4801035 | Stable | RL |
| E. coli DH10B Δdif::lux TS3-Syn100-100Kb | 4801035 | Stable | RL |
| E. coli DH10B Δdif::lux luxA*-Syn100-100Kb | 4801035 | Stable | RL |
| E. coli DH10B Δdif::lux luxB1-Syn100-100Kb | 4801035 | Stable | RL |
| E. coli DH10B Δdif::lux luxB2-Syn100-100Kb | 4801035 | Stable | RL |
| E. coli DH10B TS1-MDS42-lacZ-200Kb | 4900215 | Stable | RL |
| E. coli DH10B Δdif::lux TS1-Syn61-100Kbdif | 4803858 | Stable | LR |
| E. coli DH10B Δdif::lux TS2-Syn61-100Kbdif | 4803858 | Stable | RL |
| E. coli DH10B Δdif::lux TS3-Syn61-100Kbdif | 4803858 | Stable | RL |
| E. coli DH10B Δdif::lux TS1-Syn61-600Kbdif | 5289866 | Unstable | RL |
| E. coli DH10B Δdif::lux TS2-Syn61-600Kbdif | 5289866 | Stable | RL |
| E. coli DH10B Δdif::lux TS3-Syn61-600Kbdif | 5289866 | Unstable | RL |
| E. coli DH10B Δdif::lux TS1-Syn61-1Mbdif | 5630492 | Unstable | RL |
| E. coli DH10B Δdif::lux TS2-Syn61-1Mbdif | 5630492 | Stable | RL |
| E. coli DH10B Δdif::lux TS3-Syn61-1Mbdif | 5630492 | Unstable | RL |
| E. coli DH10B Δdif::lux TS1-Syn61-2Mbdif Syn Seg. 1 | 6609266 | Unstable | RL |
| E. coli DH10B Δdif::lux TS2-Syn61-2Mbdif Syn Seg. 1 | 6609266 | Stable | RL |
| E. coli DH10B Δdif::lux TS3-Syn61-2Mbdif Syn Seg. 1 | 6609266 | Unstable | RL |
| E. coli DH10B Δdif::lux TS1-Syn61-1Mb Syn Seg. 2 | 5756079 | Stable | RL |
| E. coli DH10B Δdif::lux TS2-Syn61-1Mb Syn Seg. 2 | 5756079 | Stable | RL |
| E. coli DH10B Δdif::lux TS3-Syn61-1Mb Syn Seg. 2 | 5756079 | Stable | LR |
| E. coli DH10B Δdif::lux TS3-Syn61-1MboriC Syn Seg. 3 | 5675263 | Stable | RL |
| E. coli DH10B Δdif::lux TS1-Syn61-500Kb Syn Seg. 4 | 5255474 | Stable | RL |
| E. coli DH10B Δdif::lux TS2-Syn61-500Kb Syn Seg. 4 | 5255474 | Stable | RL |
| E. coli DH10B Δdif::lux TS3-Syn61-500Kb Syn Seg. 4 | 5255474 | Stable | RL |
| E. coli DH10B Δdif::lux TS1-Syn61-500Kb Syn Seg. 5 | 5232612 | Stable | RL |
| E. coli DH10B Δdif::lux TS2-Syn61-500Kb Syn Seg. 5 | 5232612 | Stable | RL |
| E. coli DH10B Δdif::lux TS3-Syn61-500Kb Syn Seg. 5 | 5232612 | Stable | RL |
| E. coli DH10B Δdif::S. flexneri-1Mbdif | 5570081 | Stable | RL |
| E. coli MDS42 Δdif::S. flexneri-1Mbdif | 4860139 | Stable | RL |
| P. putida KT2440 ΔglmS::Syn100-100Kb | 6292437 | Stable | RL |
| V. natriegens DSM759 ΔglmS::MDS42-lacZ-200Kb | 3462101 | Stable* | RL |
| V. natriegens DSM759 Δdifch1::MDS42-1Mbdif | 4117792 | Stable* | RL |
| V. natriegens DSM759 Δdifch2::MDS42-1Mbdif | 2796899 | Stable* | RL |
| E. coli DH10B Δdif::Syn. Seg 1 | 6601793 | Stable | RL |
| E. coli DH10B Δdif::Syn. Seg 1-S. flexneri-1Mbdif | 7485737 | Stable | RL |

*Stability reported via sequencing, but no growth obtained following inoculation of cultures from glycerol stocks. Synthetic versions of strains were denoted as the taxonomy ID of the preceding WT strain, followed by an S#, where # is an arbitrary number assigned to a given synthetic strain.

TABLE 9
Exemplary Sequences

| Identity | SEQ ID NO: |
|---|---|
| R-TE (RE)-ortho 1 | 343 |
| R-TE (RE)-ortho 2 | 344 |
| L-TE (LE)-ortho 1 | 345 |
| L-TE (LE)-ortho 2 | 346 |
| Cas6 protein sequence-ortho 1 | 347 |
| Cas6 protein sequence-ortho2 | 348 |
| Cas7 protein sequence-ortho 1 | 349 |
| Cas7 protein sequence-ortho2 | 350 |
| Cas8 protein sequence-ortho1 | 351 |
| Cas8 protein sequence-ortho2 | 352 |
| TniQ protein sequence-ortho 1 | 353 |
| TniQ protein sequence-ortho2 | 354 |
| TnsA protein sequence-ortho 1 | 355 |
| TnsA protein sequence-ortho 2 | 356 |
| TnsB protein sequence-ortho 1 | 357 |
| TnsB protein sequence-ortho 2 | 358 |
| TnsC protein sequence-ortho 1 | 359 |
| TnsC protein sequence-ortho 2 | 360 |
| R-TE (RE) ACE Tn6677 | 361 |
| L-TE (LE) ACE Tn6677 | 362 |
| Cas6 protein sequence | 363 |
| Cas7 protein sequence | 364 |
| Cas8 protein sequence | 365 |
| TniQ protein sequence | 366 |
| TnsA protein sequence | 367 |
| TnsB protein sequence | 368 |
| InsC protein sequence | 369 |
| Cassette^{START} | 370 |
| Cassette^{STOP} | 371 |
| Cassette^{START} OASIS | 372, 373 |
| Cassette^{STOP} OASIS | 374, 375 |
| P^{ara}-Trans conj. machinery nt sequence | 376 |
| p^{Ara} -CAST machinery nt sequence | 377 |
| Ortho-Cast1 machinery nt sequence | 378 |
| pOrtho-Cast2 machinery nt sequence | 379 |
| P^{Ara}-Trans Plasmid | 380 |
| P^{Ara} _CAST Plasmid | 381 |
| pOrthoCAST1 vector | 382 |
| pOrthoCAST2 vector | 383 |
| origin of Transfer (oriT) | 384 |
| CAST crRNA repeat-scaffold-repeat | 385 (DNA), 388 (RNA) |
| orthoCAST1 crRNA repeat-scaffold-repeat | 386 (DNA), 389 (RNA) |
| orthoCAST2 crRNA repeat-scaffold-repeat | 387 (DNA), 390 (RNA) |

[0266] In at least some of the previously described embodiments, one or more elements used in an embodiment can interchangeably be used in another embodiment unless such a replacement is not technically feasible. It will be appreciated by those skilled in the art that various other omissions, additions and modifications may be made to the methods and structures described above without departing from the scope of the claimed subject matter. All such modifications and changes are intended to fall within the scope of the subject matter, as defined by the appended claims.

[0267] With respect to the use of substantially any plural and/or singular terms herein, those having skill in the art can translate from the plural to the singular and/or from the singular to the plural as is appropriate to the context and/or application. The various singular/plural permutations may be expressly set forth herein for sake of clarity. As used in this specification and the appended claims, the singular forms “a,” “an,” and “the” include plural references unless the context clearly dictates otherwise. Any reference to “or” herein is intended to encompass “and/or” unless otherwise stated.

[0268] It will be understood by those within the art that, in general, terms used herein, and especially in the appended claims (e.g., bodies of the appended claims) are generally intended as “open” terms (e.g., the term “including” should be interpreted as “including but not limited to,” the term “having” should be interpreted as “having at least,” the term “includes” should be interpreted as “includes but is not limited to,” etc.). It will be further understood by those within the art that if a specific number of an introduced claim recitation is intended, such an intent will be explicitly recited in the claim, and in the absence of such recitation no such intent is present. For example, as an aid to understanding, the following appended claims may contain usage of the introductory phrases “at least one” and “one or more” to introduce claim recitations. However, the use of such phrases should not be construed to imply that the introduction of a claim recitation by the indefinite articles “a” or “an” limits any particular claim containing such introduced claim recitation to embodiments containing only one such recitation, even when the same claim includes the introductory phrases “one or more” or “at least one” and indefinite articles such as “a” or “an” (e.g., “a” and/or “an” should be interpreted to mean “at least one” or “one or more”); the same holds true for the use of definite articles used to introduce claim recitations. In addition, even if a specific number of an introduced claim recitation is explicitly recited, those skilled in the art will recognize that such recitation should be interpreted to mean at least the recited number (e.g., the bare recitation of “two recitations,” without other modifiers, means at least two recitations, or two or more recitations). Furthermore, in those instances where a convention analogous to “at least one of A, B, and C, etc.” is used, in general such a construction is intended in the sense one having skill in the art would understand the convention (e.g., “a system having at least one of A, B, and C” would include but not be limited to systems that have A alone, B alone, C alone, A and B together, A and C together, B and C together, and/or A, B, and C together, etc.). In those instances where a convention analogous to “at least one of A, B, or C, etc.” is used, in general such a construction is intended in the sense one having skill in the art would understand the convention (e.g., “a system having at least one of A, B, or C” would include but not be limited to systems that have A alone, B alone, C alone, A and B together, A and C together, B and C together, and/or A, B, and C together, etc.). It will be further understood by those within the art that virtually any disjunctive word and/or phrase presenting two or more alternative terms, whether in the description, claims, or drawings, should be understood to contemplate the possibilities of including one of the terms, either of the terms, or both terms.

[0269] In addition, where features or aspects of the disclosure are described in terms of Markush groups, those skilled in the art will recognize that the disclosure is also thereby described in terms of any individual member or subgroup of members of the Markush group.

[0270] As will be understood by one skilled in the art, for any and all purposes, such as in terms of providing a written description, all ranges disclosed herein also encompass any and all possible sub-ranges and combinations of sub-ranges thereof. Any listed range can be easily recognized as sufficiently describing and enabling the same range being broken down into at least equal halves, thirds, quarters, fifths, tenths, etc. As a non-limiting example, each range discussed herein can be readily broken down into a lower third, middle third and upper third, etc. As will also be understood by one skilled in the art all language such as “up to,” “at least,” “greater than,” “less than,” and the like include the number recited and refer to ranges which can be subsequently broken down into sub-ranges as discussed above. Finally, as will be understood by one skilled in the art, a range includes each individual member. Thus, for example, a group having 1-3 articles refers to groups having 1, 2, or 3 articles. Similarly, a group having 1-5 articles refers to groups having 1, 2, 3, 4, or 5 articles, and so forth.

[0271] While various aspects and embodiments have been disclosed herein, other aspects and embodiments will be apparent to those skilled in the art. The various aspects and embodiments disclosed herein are for purposes of illustration and are not intended to be limiting, with the true scope and spirit being indicated by the following claims.

The application's sequence listing, which the Patent Office published only in electronic form, follows.

SEQUENCE LISTING (392 sequences)

SEQ ID NO: 1 - DNA, 6291 bp, synthetic construct
  source 1..6291: mol_type = other DNA
cctaggctgctgccaccgctgagcaataactagcataaccccttggggcctctaaacgggtcttgaggggttttttgctgaaacctcaggcatttgagaagcacacggtcacactgcttccggtagtcaataaaccggtaaaccagcaatagacataagcggctatttaacgaccctgccctgaaccgacgaccgggtcatcgtggccggatcttgcggcccctcggcttgaacgaattgttagacatcactagtttaattaattagaaaaactcatcgagcatcaaatgaaactgcaatttattcatatcaggattatcaataccatatttttgaaaaagccgtttctgtaatgaaggagaaaactcaccgaggcagttccataggatggcaagatcctggtatcggtctgcgattccgactcgtccaacatcaatacaacctattaatttcccctcgtcaaaaataaggttatcaagtgagaaatcaccatgagtgacgactgaatccggtgagaatggcaaaagtttatgcatttctttccagacttgttcaacaggccagccattacgctcgtcatcaaaatcactcgcatcaaccaaaccgttattcattcgtgattgcgcctgagcgagacgaaatacgcggtcgctgttaaaaggacaattacaaacaggaatcgaatgcaaccggcgcaggaacactgccagcgcatcaacaatattttcacctgaatcaggatattcttctaatacctggaatgctgttttcccggggatcgcagtggtgagtaaccatgcatcatcaggagtacggataaaatgcttgatggtcggaagaggcataaattccgtcagccagtttagtctgaccatctcatctgtaacatcattggcaacgctacctttgccatgtttcagaaacaactctggcgcatcgggcttcccatacaatcgatagattgtcgcacctgattgcccgacattatcgcgagcccatttatacccatataaatcagcatccatgttggaatttaatcgcggcctagagcaagacgtttcccgttgaatatggctcatactcttcctttttcaatattattgaagcatttatcagggttattgtctcatgagcggatacatatttgaatgtatttagaaaaataaacaaactcgagggtaccgcgctgcggacacatacaaagttacccacagattccgtggataagcaggggactaacatgtgaggcaaaacagcagggccgcgccggtggcgtttttccataggctccgccctcctgccagagttcacataaacagacgcttttccggtgcatctgtgggagccgtgaggctcaaccatgaatctgacagtacgggcgaaacccgacaggacttaaagatccccaccgtttccggcgggtcgctccctcttgcgctctcctgttccgaccctgccgtttaccggatacctgttccgcctttctcccttacgggaagtgtggcgctttctcatagctcacacactggtatctcggctcggtgtaggtcgttcgctccaagctgggctgtaagcaagaactccccgttcagcccgactgctgcgccttatccggtaactgttcacttgagtccaacccggaaaagcacggtaaaacgccactggcagcagccattggtaactgggagttcgcagaggatttgtttagctaaacacgcggttgctcttgaagtgtgcgccaaagtccggctacactggaaggacagatttggttgctgtgctctgcgaaagccagttaccacggttaagcagttccccaactgacttaaccttcgatcaaaccacctccccaggtggttttttcgtttacagggcaaaagattacgcgcagaaaaaaaggatctcaagaagatcctttgatcttttctactgaaccgctctagatggccacgatgcgtccggcgtagaggatctgctcatgtttgacagcttatcatcgatgcataatgtgcctgtcaaatggacgaagcagggattctgcaaaccctatgctactccgtcaagccgtcaattgtctgattcgttaccaattatgacaacttgacggctacatcattcactttttcttcacaaccggcacggaactcgctcgggctggccccggtgcattttttaaatacccgcgagaaatagagttgatcgtcaaaaccaacattgcgaccgacggtggcgataggcatccgggtggtgctcaaaagcagcttcgcctggctgatacgttggtcctcgcgccagcttaagacgctaatccctaactgctggcggaaaagatgtgacagacgcgacggcgacaagcaaacatgctgtgcgacgctggcgatatcaaaattgctgtctgccaggtgatcgctgatgtactgacaagcctcgcgtacccgattatccatcggtggatggagcgactcgttaatcgcttccatgcgccgcagtaacaattgctcaagcagatttatcgccagcagctccgaatagcgcccttccccttgcccggcgttaatgatttgcccaaacaggtcgctgaaatgcggctggtgcgcttcatccgggcgaaagaaccccgtattggcaaatattgacggccagttaagccattcatgccagtaggcgcgcggacgaaagtaaacccactggtgataccattcgcgagcctccggatgacgaccgtagtgatgaatctctcctggcgggaacagcaaaatatcacccggtcggcaaacaaattctcgtccctgatttttcaccaccccctgaccgcgaatggtgagattgagaatataacctttcattcccagcggtcggtcgataaaaaaatcgagataaccgttggcctcaatcggcgttaaacccgccaccagatgggcattaaacgagtatcccggcagcaggggatcattttgcgcttcagccatacttttcatactcccgccattcagagaagaaaccaattgtccatattgcatcagacattgccgtcactgcgtcttttactggctcttctcgctaaccaaaccggtaaccccgcttattaaaagcattctgtaacaaagcgggaccaaagccatgacaaaaacgcgtaacaaaagtgtctataatcacggcagaaaagtccacattgattatttgcacggcgtcacactttgctatgccatagcatttttatccataagattagcggatcctacctgacgctttttatcgcaactctctactgtttctccatacccgtttttttgggctagcaggaggaattcaccatggatattaatactgaaactgagatcaagcaaaagcattcactaaccccctttcctgttttcctaatcagcccggcatttcgcgggcgatattttcacagctatttcaggagttcagccatgaacgcttattacattcaggatcgtcttgaggctcagagctgggcgcgtcactaccagcagctcgcccgtgaagagaaagaggcagaactggcagacgacatggaaaaaggcctgccccagcacctgtttgaatcgctatgcatcgatcatttgcaacgccacggggccagcaaaaaatccattacccgtgcgtttgatgacgatgttgagtttcaggagcgcatggcagaacacatccggtacatggttgaaaccattgctcaccaccaggttgatattgattcagaggtataaaacgaatgagtactgcactcgcaacgctggctgggaagctggctgaacgtgtcggcatggattctgtcgacccacaggaactgatcaccactcttcgccagacggcatttaaaggtgatgccagcgatgcgcagttcatcgcattactgatcgttgccaaccagtacggccttaatccgtggacgaaagaaatttacgcctttcctgataagcagaatggcatcgttccggtggtgggcgttgatggctggtcccgcatcatcaatgaaaaccagcagtttgatggcatggactttgagcaggacaatgaatcctgtacatgccggatttaccgcaaggaccgtaatcatccgatctgcgttaccgaatggatggatgaatgccgccgcgaaccattcaaaactcgcgaaggcagagaaatcacggggccgtggcagtcgcatcccaaacggatgttacgtcataaagccatgattcagtgtgcccgtctggccttcggatttgctggtatctatgacaaggatgaagccgagcgcattgtcgaaaatactgcatacactgcagaacgtcagccggaacgcgacatcactccggttaacgatgaaaccatgcaggagattaacactctgctgatcgccctggataaaacatgggatgacgacttattgccgctctgttcccagatatttcgccgcgacattcgtgcatcgtcagaactgacacaggccgaagcagtaaaagctcttggattcctgaaacagaaagccgcagagcagaaggtggcagcatgacaccggacattatcctgcagcgtaccgggatcgatgtgagagctgtcgaacagggggatgatgcgtggcacaaattacggctcggcgtcatcaccgcttcagaagttcacaacgtgatagcaaaaccccgctccggaaagaagtggcctgacatgaaaatgtcctactttcacaccctgcttgctgaggtttgcaccggtgtggctccggaagttaacgctaaagcactggcctggggaaaacagtacgagaacgacgccagaaccctgtttgaattcacttccggcgtgaatgttactgaatccccgatcatctatcgcgacgaaagtatgcgtaccgcctgctctcccgatggtttatgcagtgacggcaacggccttgaactgaaatgcccgtttacctcccgggatttcatgaagttccggctcggtggtttcgaggccataaagtcagcttacatggcccaggtgcagtacagcatgtgggtgacgcgaaaaaatgcctggtactttgccaactatgacccgcgtatgaagcgtgaaggcctgcattatgtcgtgattgagcgggatgaaaagtacatggcgagttttgacgagatcgtgccggagttcatcgaaaaaatggacgaggcactggctgaaattggttttgtatttggggagcaatggcgatagttgccaaacgactattaaggaggtatttttatggctatcgacgaaaacaaacagaaagcgttggcggcagcactgggccagattgagaaacaatttggtaaaggctccatcatgcgcctgggtgaagaccgttccatggatgtggaaaccatctctaccggttcgctttcactggatatcgcgcttggggcaggtggtctgccgatgggccgtatcgtcgaaatctacggaccggaatcttccggtaaaaccacgctgacgctgcaggtgatcgccgcagcgcagcgtgaaggtaaaacctgtgcgtttatcgatgctgaacacgcgctggacccaatctacgcacgtaaactgggcgtcgatatcgacaacctgctgtgctcccagccggacaccggcgagcaggcactggaaatctgtgacgccctggcgcgttctggcgcagtagacgttatcgtcgttgactccgtggcggcactgacgccgaaagcggaaatcgaaggcgaaatcggcgactctcacatgggccttgcggcacgtatgatgagccaggcgatgcgtaagctggcgggtaacctgaagcagtccaacacgctgctgatcttcatcaaccagatccgtatgaaaattggtgtgatgttcggtaacccggaaaccactaccggtggtaacgcgctgaaattctacgcctctgttcgtctcgacatccgtcgtatcggcgcggtgaaagagggcgaaaacgtggtgggtagcgaaacccgcgtgaaagtggtgaagaacaaaatcgctgcgccgtttaaacaggctgaattccagatcctctacggcgaaggtatcaacttctacggcgaactggttgacctgggcgtaaaagagaagctgatcgagaaagcaggcgcgtggtacagctacaaaggtgagaagatcggtcagggtaaagcgaatgcgactgcctggctgaaagataacccggaaaccgcgaaagagatcgagaagaaagtacgtgagttgctgctgagcaacccgaactcaacgccggatttctctgtagatgatagcgaaggcgtagcagaaactaacgaagatttttaa

SEQ ID NO: 2 - DNA, 27104 bp, synthetic construct
  source 1..27104: mol_type = other DNA
gagcttatcgcgaataaatacctgtgacggaagatcacttcgcagaataaataaatcctggtgtccctgttgataccgggaagccctgggccaacttttggcgctagcaaaaaaaatccttagctttcgctaaggatgataagcgtagcgcatcaggcaatttagcgtttgttaagcgatcgcgtatacactccgctatcgctacgtgactgggtcatggctgcgccccgacacccgccaacacccgctgacgcgccctgacgggcttgtctgctcccggcatccgcttacagacaagctgtgaccgtctccgggagctgcatgtgtcagaggttttcaccgtcatcaccgaaacgcgcgaggcagcaaggagatggcgcccaacagtcccccggccacggggcctgccaccatacccacgccgaaacaagcgctcatgagcccgaagtggcgagcccgatcttccccatcggtgatgtcggcgatataggcgccagcaaccgcacctgtggcgccggtgatgccggccacgatgcgtccggcgtagaggatctgctcatgtttgacagcttatcatcgatgcataatgtgcctgtcaaatggacgaagcagggattctgcaaaccctatgctactccgtcaagccgtcaattgtctgattcgttaccaattatgacaacttgacggctacatcattcactttttcttcacaaccggcacggaactcgctcgggctggccccggtgcattttttaaatacccgcgagaaatagagttgatcgtcaaaaccaacattgcgaccgacggtggcgataggcatccgggtggtgctcaaaagcagcttcgcctggctgatacgttggtcctcgcgccagcttaagacgctaatccctaactgctggcggaaaagatgtgacagacgcgacggcgacaagcaaacatgctgtgcgacgctggcgatatcaaaattgctgtctgccaggtgatcgctgatgtactgacaagcctcgcgtacccgattatccatcggtggatggagcgactcgttaatcgcttccatgcgccgcagtaacaattgctcaagcagatttatcgccagcagctccgaatagcgcccttccccttgcccggcgttaatgatttgcccaaacaggtcgctgaaatgcggctggtgcgcttcatccgggcgaaagaaccccgtattggcaaatattgacggccagttaagccattcatgccagtaggcgcgcggacgaaagtaaacccactggtgataccattcgcgagcctccggatgacgaccgtagtgatgaatctctcctggcgggaacagcaaaatatcacccggtcggcaaacaaattctcgtccctgatttttcaccaccccctgaccgcgaatggtgagattgagaatataacctttcattcccagcggtcggtcgataaaaaaatcgagataaccgttggcctcaatcggcgttaaacccgccaccagatgggcattaaacgagtatcccggcagcaggggatcattttgcgcttcagccatacttttcatactcccgccattcagagaagaaaccaattgtccatattgcatcagacattgccgtcactgcgtcttttactggctcttctcgctaaccaaaccggtaaccccgcttattaaaagcattctgtaacaaagcgggaccaaagccatgacaaaaacgcgtaacaaaagtgtctataatcacggcagaaaagtccacattgattatttgcacggcgtcacactttgctatgccatagcatttttatccataagattagcggatcctacctgacgctttttatcgcaactctctactgtttctccatacccgtttttttgggctagcgaattcgtaggggttactgaaaagtgagcgggaaagaagagtttcagaccatcaaggagcgggccaagcgcaagctggaacgcgacatgggtgcggacctgttggccgcgctcaacgacccgaaaaccgttgaagtcatgctcaacgcggacggcaaggtgtggcacgaacgccttggcgagccgatgcggtacatctgcgacatgcggcccagccagtcgcaggcgattatagaaacggtggccggattccacggcaaagaggtcacgcggcattcgcccatcctggaaggcgagttccccttggatggcagccgctttgccggccaattgccgccggtcgtggccgcgccaacctttgcgatccgcaagcgcgcggtcgccatcttcacgctggaacagtacgtcgaggcgggcatcatgacccgcgagcaatacgaggtcattaaaagcgccgtcgcggcgcatcgaaacatcctcgtcattggcggtactggctcgggcaagaccacgctcgtcaacgcgatcatcaatgaaatggtcgccttcaacccgtctgagcgcgtcgtcatcatcgaggacaccggcgaaatccagtgcgccgcagagaacgccgtccaataccacaccagcatcgacgtctcgatgacgctgctgctcaagacaacgctgcgtatgcgccccgaccgcatcctggtcggtgaggtacgtggccccgaagcccttgatctgttgatggcctggaacaccgggcatgaaggaggtgccgccaccctgcacgcaaacaaccccaaagcgggcctgagccggctcgccatgcttatcagcatgcacccggattcaccgaaacccattgagccgctgattggcgaggcggttcatgtggtcgtccatatcgccaggacccctagcggccgtcgagtgcaagaaattctcgaagttcttggttacgagaacggccagtacatcaccaaaaccctgtaaggagtatttccaatgacaacggctgttccgttccgtctgaccatgaatcgcggcattttgttctaccttgccgtgttcttcgttctcgctctcgcgttatccgcgcatccggcgatggcctcggaaggcaccggcggcagcttgccatatgagagctggctgacgaacctgcgcaactccgtaaccggcccggtggccttcgcgctgtccatcatcggcatcgtcgtcgccggcggcgtgctgatcttcggcggcgaactcaacgccttcttccgaaccctgatcttcctggttctggtgatggcgctgctggtcggcgcgcagaacgtgatgagcaccttcttcggtcgtggtgccgaaatcgcggccctcggcaacggggcgctgcaccaggtgcaagtcgcggcggcggatgccgtgcgtgcggtagcggctggacggctcgcctaatcatggctctgcgcacgatccccatccgtcgcgcaggcaaccgagaaaacctgttcatgggtggtgatcgtgaactggtgatgttctcgggcctgatggcgtttgcgctgattttcagcgcccaagagctgcgggccaccgtggtcggtctgatcctgtggttcggggcgctctatgcgttccgaatcatggcgaaggccgatccgaagatgcggttcgtgtacctgcgtcaccgccggtacaagccgtattacccggcccgctcgaccccgttccgcgagaacaccaatagccaagggaagcaataccgatgatccaagcaattgcgattgcaatcgcgggcctcggcgcgcttctgttgttcatcctctttgcccgcatccgcgcggtcgatgccgaactgaaactgaaaaagcatcgttccaaggacgccggcctggccgatctgctcaactacgccgctgtcgtcgatgacggcgtaatcgtgggcaagaacggcagctttatggctgcctggctgtacaagggcgatgacaacgcaagcagcaccgaccagcagcgcgaagtagtgtccgcccgcatcaaccaggccctcgcgggcctgggaagtgggtggatgatccatgtggacgccgtgcggcgtcctgctccgaactacgcggagcggggcctgtcggcgttccctgaccgtctgacggcagcgattgaagaagagcgccggcggcatttcgagagcctgggaacgatgtacgagggctatttcgtcctcaccttgacctggttcccgccgctgctcgcccagcgcaagttcgtcgagctgatgtttgacgacgacgcgaccgcaccggatcgcaaggcgcgcacgcggggcctcatcgaccaattcaagcgtgacgtgcgcagcatcgagtcgcgcctgtcgtcggccgtgtcgctcactcgcttgaaggggcacaagatcgtcaacgaggacggcacgaccgtcacgcatgacgacttcctgcgctggctgcaattctgcgtgacgggcctgcaccatccggtgcagctccccagcaacccgatgtacctggacgccctggtcggcggacaggaaatgtggggcggggtagtgcccaaggtcggccgcaagttcgtccaggtggtcgctctcgaaggcttccccttggagtcctatcccggcatcctgacggcgctcggcgagctgccctgcgagtatcggtggtcgagccggttcatcttcatggaccagcacgaagccgtgaagcacctcgacaagttccgcaagaagtggcggcagaagattcgcggcttcttcgaccaggtgttcaacacgaacaccggcccggtcgatcaggacgcgctttcgatggtggccgatgctgaggcggccattgccgaagtcaacagcggcatcgtggccgtgggctactacaccagcgtcgtcgtgctgatggatgaggaccgcacgcgcctggaagctgcggcccgcgatgttgaaaaggccgtcaaccggttgggctttgccgcgcgcatcgagtccatcaacaccctggacgccttccttggtagtttgccgggccacggcgtggaaaacgtccgccggccgctcatcaacacgatgaacctggccgacctgctgccgaccagcaccatctggaccggcaacgcgaacgcgccatgcccgatgtacccgccgctgtcgccggcgctcatgcactgcgtcacgcaaggatcaacgccgttccggctgaacctgcacgtgcgcgacctcggccacacctttatgttcgggccgaccggcgcaggtaaatcgacgcacctggcgatcctcgccgcgcagctccgtcgctatgccggcatgtcgatcttcgcctttgacaagggcatgtcgatgtacccgctggccgccggcatccgtgcggccacgaagggcaccagcggcctgcacttcaccgtggcggccgacgacgaacgcctggcgttctgcccgttgcagttcctgagcaccaagggcgaccgtgcttgggcgatggagtggatcgacaccatcctggcgttgaacggcgtcgaaacgaccccggcccagcgcaacgaaatcggcaacgcgatcatgagcatgcacgccagcggcgcgcgcacgctctccgagttcagcgtgacgattcaggatgaggcgatccgcgaggcgatccgccagtacaccgtcgatggcgcaatgggccatctgctcgacgccgaagaggacggcttggcgctgtccgactttacagtgttcgagatcgaagagctgatgaacctcggcgagaaattcgccctgcctgtgttgctctacctgttccgccgtatcgagcgcgccctgacgggccagccggccgtcatcatcctggacgaagcctggttgatgctcggccacccggcattccgcgcgaagatcagggaatggctcaaggtgctgcgtaaggccaactgccttgtgctgatggcaacgcagagcctgtccgacgccgccaacagcggcatcctggacgtgatcgtggaatcgaccgcgaccaagattttcctgccgaatatttacgccagggatgaggacacggcggccctgtaccgccgcatgggcctgaacgctcgccagatcgagattctggcccaggccgttcccaagcgtcagtactactacgtgtcggaaaacggccgccgtctctacgacctggcacttggcccgctcgcgctcgcgttcgtcggcgcatccgacaaggaatccgtcgccatcatcaagaacctggaagccaagttcggcgaccagtgggtggatgaatggctgcgtggccggggcctcgcccttgatgaatacctggaggcagcatgagttttgcagacacgatcaagggcttgatcttcaagaagaagcccgcaacggccgcagcagcggcgacgccggccgcgaccggcccgcaaaccgacaacccgtacctgacggcgcggcgcacctggaacgaccacgttggttccgttgtgtcgcaaaagcagacctggcaggttgtcggcatcctttcgctgatgatcgtcctcgcggcggtcggcggcatcatccacatcggcagccagtcgaagttcgtgccctatgtctacgaggtagacaagctcgggcagacggccgccgtggggccgatgaccagggcgtcgaaagccgatccgcgtgtcattcacgcctcggtggctgagttcgtcggcgatgctcgcctggtgacgccggacgtagctttgcagcgcaaggccgtctaccgcctctatgccaagctcgggccgaatgacccggccaccgccaagatgaacgaatggctcaacggcaccgccgacgccagcccgttcgctcgcgcggccgtcgaaacggtcagcaccgaaatcacttccgtaatcccgcagacgcccgacacctggcaggtcgattgggtcgagacgacgcgcgacaggcaaggcgtggtgaaaggccagcccgtgcgcatgcgggccttggtgacggtctacgtcgtcgagccgacggcggacaccaaggaagaacaactgcgaaacaacccggccgggatctacgtccgggacttctcctggtcgagacttctgtgaggcactgaattatgaaaaaggaactgtttgctttggtcctggccgcgtccgttagcgtgcctgcatttgccgccgatcccggcgcggacctgactgacctctatttttccggcaagaacccggagctgaccgcgcaagagcgggcggccatcgccatcgccaagaagtgggaggcgggtaccgccggcatgcggccggtggccggccccggtggttcggtgcgcttcctgttcggcgcgcagcagccgagcatcgtatgcgccgtgctgcaagtgtgcgacgtggccctgcaacccggcgagcaagtcaactcgatcaacctgggcgacaccgcccgttggacggtcgagccggccattaccggcagcggcgcgaacgaaacccagcacctcatcatcaagccgatggatgtgggcctggaaaccagcctggtcgtgaccacggaccgccgcagctaccacatgcgcctgcgctcgcatcgcacgcagtacatgccgcaggtgtcgttcacctacccggaagatgcccttgcgaagtgggacgccatcaagaaccgcgaacagcgggatcgcgtcgagaaaaccattccgcagaccggcgagtacctgggcaacctgagcttcaactactccgtcagcgggtccacgtcgtggaagccggtgcgcgtctacaacgacggcaagaaaaccatcatccagatgccgcactcgatggaacagaccgaagcgccgacgctcctggtcgttcgcagggagggcggcctgttctccgacgatgaaacggtgatggtcaactaccgggtccagggcgaccgctacatcgtcgatacgattttcgacaaggccatcctcatcgcgggcgtgggcagcagccaggaccgcgtgaccatttcaagggggaactaaaccatgcgtaagattctgaccgtcatcgcactcgcggccacgttggccggctgcgcgacctccaagtacggcagcttcgtccaggacgcgccggccgcctacaaccagaccattgcgaccgacgcggtgaagcagctcgtcaagctctacccgccggcgcaaaccaagctggaattgcagcaggctacgcccgatccgttcggcattgccctggtcactgaccttcgcgcccagggctatgctgtcatggagtacaagcccgacggcaacgcggccgcagctccggctgctgcgtcctcggccgctgcgaagccggcaacgccgcaagcccagggcggctatccgctgcgctacgtgctggaccaattcagcgacagcaacctgtatcgcctgaccgtcatggtcggctctcaatcgctcacgcgcgcctacctcgcccaaaacaacacgatggtcccggccggcgcatgggttcggaaggagtaagccaatgagcgaagatcaaatggcaccggacgcatcgccagatgcggtcaagccgaaaagcggggttcgccgcgtcaacaacatgccgatgtacctcatcggcggtgtgctcggcatcttcctgctggtgatggccctggttgctgcggatcgcgctgcgcagcagaaccagccgggagctgcgaaggctgagaaggccggcagcaccagcatgtttgccgacgaaattgccggcaaacagcaggacggcatcatcaaggccaagccgctggagattccgccggaacaaaccgcccagcaaccgacgacggagctgacgccagccccggcgcagggaacgactatcacggtcgcacggcccgagaacctggaccagcccccgacgccgccgcagggtgcgcgcaacgaggacctggaccgcatccgcatggcgaagttgcagatgctggaagaggcgatcaaggccaagacgacggtgcgcatcgacgcgccgcgcagccagggcagcgccggcggcggtgctccgcagggccgcgaggaaacccttgcgcgcatccaggagctgcgtcggcaggctgagaacgcccgcgccaccgatccgaccgccgcctatcaggccgcgcttgcgcaggctcgcacgatgggcggcgcggcagggggtggcggtatgggcggctcgggtgcgccgaccctcgtgcagacctcgaaccgcagtggtggcggcgctggctatgggtcgttcgacaaccgcagcgagggcgaccgttggcggctcgactcccagccggaagcacctgcaacgccctatgtgctgcgcgctggcttcgtcgttccggctacgcttatctcgggcatcaactccgatctgccaggccaaatcatggcccaggtatcgcagtcggtgtacgacacggcgaccggcaagcacatgctcatcccccaaggctcgcgcctggtgggcagctactcgaacgatgtggcctacgggcagaagcgcgttctggtggcatggcagcgcatcatcttccccgacggcaaggcaatggacattggggccatgccgggcggcgatagcgctgggtatgcaggcttcaacgacaaggtcaacaaccactacttccgcaccttcgcatcggcattcctcatgtcgggcgtcgttgcgggcatcagcttgagtcaggaccgtggcaacagcaacagcggttacggacgacaagacgcgggttccgcgatgagtgaagcgttgggtcaacagctcggccaagtaacggcgcagatgatcgccaaaaacttgaatatcgcgccgacgctggaaatccgtccgggctatcgcttcaacgtcattgtcacgaaagacatgacgttttctaagccctaccaggcgtttgactattaactccaaggagtaacttatgaagaagctcgctaagaatgttttagccgctaaagtagctctggtgctggccctctcggtcggcaccttggcggtcacgcctgcgcaagcgggcattccggtcatcgacggcaccaacctgtcacaaaccactgtcaccgcgattcagcaggttgcgcaggtccagaagcaaatcgaggaataccggacgcagttgcagcagtacgaaaacatgctgcaaaacacggtggccccggccgcctacgtgtgggaccaggcgcagtccaccatcaacggcctgatgagcgccgttgataccctgaactactacaagaaccaggcgggcagcatcgacgcttacctgggcaagttcaaggacgtgtcctactacaaggggtcgccgtgcttctccctgtcgggctgctcggaaagcgagcgcaaggcgatggaagagaaccgccgcctggcgtccgaatcgcagaaaaaggccaacgatgcgctgttccgtggcctcgatcagcagcagagcaacctcaagtccgacgccgccacgctggagcaattgaagggcaaggcgacgacggcgcagggccagttggaagccctcggctacgccaaccagttcgccagccagcaggccaaccagctcatgcaaatccgtggccttctgcttgcgcagcagaacgccatcgccacgcagatgcaggcccagcaggaccggcaggcccagcaggacgctgcgggcgcgaagctgcgcgagggttcgtaccgcgcaagcccgtctaagacctggtgaggggaggcgcgatgaagaaatccaacttcatcgcagttgccgcgctggccgccgtcatggcggccagcctggcaggctgcgacaacaagcccgacaccgacaagctgacctgcgccgatctgccgaaggtcacggatgccgctcaacgcgcggagctgttgaagaagtgcccgcgcggagaaccgggaggcttcaagcccagcgaaaagaaagagtggtgatgacgtatgaaaatccagactagagctgccgcgctcgcggtcctgatgctggccttgatgccggtagcggcatacgcccaaatcgacaattcgggcatcctcgacaacgtattgcagcgctaccagaacgccgcgagcggctgggccactgtcgtccagaacgccgcaacctggctgttctggaccttgaccgtgattagcatggtctggaccttcggcatgatggcactgcgcaaggccgacattggcgagttcttcgccgagttcgtgcggttcaccatcttcaccggcttcttctggtggctgctgaccaacggcccgaatttcgcgtcgtccatctatgcgtccctgcggcagattgcaggccaggcaacggggttggggcaggggctttcgccgtccggcatcgtcgatgttggcttcgagattttcttcaaggtgatggacgaaacctcgtactggtcgccggtcgatagcttcgtcggtgcctcgttggcggccgccatcctctgcatcctggccctggtcggcgtgaatatgcttctgctcctggcgtccggatggattcttgcctacggcggtgtgttcttcctgggcttcggcggctcgcgctggacctcggacatggcgatcaactactacaagaccgtcctcggggtcgccgcgcagctcttcgcaatggtgctgctcgtaggcatcggcaagaccttcctcgatgactactacagccgcatgagcgaaggcatcaacttcaaggaacttggagtgatgctgatcgtcggcctgatcctgctcgttctggtcaacaaggtgccgcagctcatcgccggcatcatcaccggcgcgagcgtcggcggtgctggtatcggccagttcggcgctggcacgctcgtcggtgcggccgcgacggccggcgcggcaatcgcaactggcggcgcatctatcgcggccggcgctgcggcggcggccggtggcgcgcaggccatcatggcggccgcgtcgaaggccagcgataacgtctctgccggcactgacattctgtcgagcatgatgggcggcggcggtggcggcggcggtggtagcgccggcaccagcggcggcgacggcggcggctcgggtggcggcggtggctcgggcggcggtgaaaccccgatggcctcggccgccggcgacaacagcagcggcgcacgcggcggcagttcgggcggcggctcgggtggtggccgttcgtctggcggtatcggtgccacggcggccaagggcggccggatcgcggccgataccgtcgccaacctggcgaaaggtgccggctcgattgccaaggccaaggccggcgaaatgcgcgcatcggcccaggaacgcatcggcgataccgtaggcggcaagatcgcgcaggcaattcgcggcgcgggtgcggcggcgcagaccgctgcaaccgtcgccgatagcaacagccaggcgcaggaacaacctgcaccggcacccgcaccgtcgttcgacgacaacagcctttccgcaagcaacaacagggaagcggccgccgacgcggattccgaagtggcgagcttcgtcaacaagcccgcccaatcctgaaacgactcttaggagctacgtaaggctgttttggcggatgagggcgcagtcagagcttgggcctgtcaaacaagcccagctaacgcaaaaacaagcccggcaacgccgggctttttcatctgcgcctctgcgattcataacgaggcccacaccaccagggcggccgcgaacaacaccatgccgccggcgatcatgttcatcatcgccacgcgccgcgcgtccgcgaccttggccgcgagctggcggccaaggccgtcgtcgatttccctgcggatcgcttcggccgcctgcgcggcgctgtccttcattaccttcgccattgcgtccttgctggccgccagggccgcgttcagcatccgctccgctttggccttggcgtcctcgccccaacgatgggcgatcccttccagctcttccttgaacgcggcaaggatttcctcttgcttggccgcactgtcggccatgagccgggcgttgatggtatgcaggatcagcaccgggtcgtcgcggccgacggcgatgccgtgcttggccgcaatctcccggatcagctcttcaatctggtcgctcatagcacggccgccgcgtcgagctgttcaaacaggccgcgccgcacgatcttgaggcgttgccgcgtcatgatcgtgagcgattcatcggccagcgcctggtcgaacgtcagccgctcttgcagcatgtcgctgaaatcgcggccgtaggtttcttccttgagggccggaatctggatgatggacgacacgcgggccttgttggccgtgtacgccttcatctgctcaaagctcttgccctcatgctcgataggcccccaatacgggttcagccagaccacgaaaagcgcttcggccgggaactggctggcgagctgggcgaagccgctcaccgtgtccaggagagcctggccgccggtgacgacggtatggatgaccagctcatgccccatttcttgcagcagagccggcacctggttgctgatgaggtaatgcgacagaggcacgaacgagctggcaccgttgtcgatcaccacgtcatccttggtcggcgcaatcagctcgaccagggtgtcgaagttgcgcgagttaatttcgtcgccggccatgatgttcagccggcggacgttcagggccttgtagccctcgaacgtcgcgttcaccgggtcggtgtcgatgcacaagggtgtctgccccttgtccatcttgtactgcgcaatgatcgcggcgatggccgacttgccgaccccgcccttgccctgcaaaaccatgtgaattttcgccattacagtagatcctttttgtccggtgttgggttgaaggtgaagccggtcggggccgcagcgggggccggcttttcagccttgcccccctgcttcggccgccgtggctccggcgtcttgggtgccggcgcgggttccgcagccttggcctgcggtgcgggcacatcggcgggcttggccttgatgtgccgcctggcgtgcgagcggaacgtctcgtaggagaacttgaccttccccgtttcccgcatgtgctcccaaatggtgacgagcgcatagccggacgctaacgccgcctcgacatccgccctcaccgccaggaacgcaaccgcagcctcatcacgccggcgcttcttggccgcgcgggattcaacccactcggccagctcgtcggtgtagctctttggcatcgtctctcgcctgtcccctcagttcagtaatttcctgcatttgcctgtttccagtcggtagatattccacaaaacagcagggaagcagcgcttttccgctgcataaccctgcttcggggtcattatagcgattttttcggtatatccatcctttttcgcacgatatacaggattttgcttaatttgaaaattggaatatccatcacataacgacatgtcgcagcaatttaatccatatttatgctgtttccgacctgacacctgcgtgagttgttcacgtattttttcacggtgtatccaacggcgtcagtaggcccacccgcgagcgggtgttccttcttcactgtcccttattcgcacctggcggtgctcaacgggaatcctgctctgcgaggctggccggctaccgccggcgtaacagatgagggcaagcggatggctgatgaaaccaagccaaccaggaagggcagcccacctatcaaggtgtactgccttccagacgaacgaagagcgattgaggaaaaggcggcggcggccggcatgagcctgtcggcctacctgctggccgtcggccagggctacaaaatcacgggcgtcgtggactatgagcacgtccgcgagctggcccgcatcaatggcgacctgggccgcctgggcggcctgctgaaactctggctcaccgacgacccgcgcacggcgcggttcggtgatgccacgatcctcgccctgctggcgaagatcgaagagaagcaggacgagcttggcaaggtcatgatgggcgtggtccgcccgagggcagagccatgacttttttagccgctaaaacggccggggggtgcgcgtgattgccaagcacgtccccatgcgctccatcaagaagagcgacttcgcggagctggtgaagtacatcaccgacgagcaaggcaagaccgagcgcctgggtcacgtgcgcgtcacgaactgcgaggcaaacaccctgcccgctgtcatggccgaggtgatggcgacccagcacggcaacacccgttccgaggccgacaagacctatcacctgctggttagcttccgcgcgggagagaagcccgacgcggagacgttgcgcgcgattgaggaccgcatctgcgctgggcttggcttcgccgagcatcagcgcgtcagtgccgtgcatcacgacaccgacaacctgcacatccatatcgccatcaacaagattcacccgacccgaaacaccatccatgagccgtatcgggcctaccgcgccctcgctgacctctgcgcgacgctcgaacgggactacgggcttgagcgtgacaatcacgaaacgcggcagcgcgtttccgagaaccgcgcgaacgacatggagcggcacgcgggcgtggaaagcctggtcggctggatcaagcgcgaatgcctgccggagctgcaagcggcgcaatcctgggaggacctgcaccgcgtcctgcgggaaaacgggcttaagctgcgcgagcgcggaaacggcttcatcttcgaggccggcgacggcacgacggtcaaggccagcaccgtttcgcgcgacctgtccaagccgaagctcgaagcccgattcggggcattcacgccagccgagggcggcgaagccccccggcggcgggagtatcgagcgaagccgctcaagacccgcatcgacaccaccgagctatacgcccggtatcagtctgaacgccaggaaatgggggccgtgcgcaagggcgagctggacacgctgcgccggcgtcgtgaccgcctgattgaagccgcgatgcgcagcaaccggctgcgccgcgccgctatcaagctgctgggcgaggggcgcattgcaaagcgactgatgtacgcgcaggcgcacaaggctctgcgcgccgacctggacaagatcaaccgcgagtaccggcagggccgtcaggcggtccaggagcgcacgcagcgccgcgcgtgggccgactggctcaaggccgaggcgatgaagggcgacgacaaggccctggccgcgctgcgcgcacgcgagggccgcagcgacctcaagggcaacaccatccagggcagcggcgaggccaagccgggccatgcggccgtgacggacaacatcacgaagaagggaaccatcatctatcgcgtcggcagcagcgccgtccgcgacgacggcgaccgcctgcaagtctcgcgcgaggccaccacggacggcctggacgccgccctgcgcctggcaatggagcgcttcggcgaccggatcaccgtcaacggcacagcagagttcaaggagcggatcgcgcaggcggccgccgctggccgtctggcaatcacctttgacgacgccgcccttgagcgccgccgtcaagaactactgacgaaggagcaagcacatgagcaacccgaacgaaatgacggacgaagagatcgcggcggcgatggaggcattcgacctgccgcagccagaaccaccctcaacgccacaggcggcgacggcgaccgacgggacgctcgcgccgtcagcgccggcggaaccgtcgcactccgcaagcccaacgttggacgcattggacgaaagccgccgccccaaagccaaaaccgtttgcgagcgctgtcccaactcggtgtggttcgcatcgccggcggagctgaaatgctattgccgcgtgatgttcctggtcacgtggagcagcaaggagccgaaccagctcacgcactgcgacggggagtttctgggccaggaagagggctaaagcccgaacagatcgcggcggccgagaaatatgttgccgagcgcgagcaaaagcggctaaacggcttcgatataccgaagcatgcacgatatactgattatgttggtgcgctgtcctatgcaggcacccggaacgtcgaggaccaggcgctggccctgttgaggaaagaaaacgacgagattctggtgctgcccgtcgataaggccacggtgcaacgcatgaagcgcctcgccatcggtgatcccgtcaccgtgaccccgcgaggctcccttaaaactacccgaggtaggagtagatgaagaaccgaaacaacgccgtggggccacagatacgggcgaaaaaaccgaaggccagcaagaccgttcccatcctcgccggcctgtcccttggggcaggcttgcagaccgcgacgcaatatttcgcccattccttccagtatcaggccggacttggctggaatatcaaccacgtctacacgccctggtcgatccttcaatgggccggcaagtggtacggccaatatcccgacgatttcatgcgcgcggccagcatgggtatggtcgtttcgaccgtgggcctgctgggcacggccgtcacgcagatggtcaaggcgaacaccggcaaggcgaacgactatctgcacggttcggcccgctgggccgacaagaaggacatacaggccgccggcctgctgccccggccgcgcaccgtcgtcgagctggtgtcaggcaaacacccgcccacttccagcggcgtctatgtgggcggctggcaggacaaggacggcaagttccactacctgcggcacaacggccccgagcacgtcttgacctacgcgccgacgcgctccggcaagggcgtcggcctggtcgttccgacgctgctttcctgggcgcacagcgccgtcatcaccgacctgaaaggcgagttgtgggcgctgaccgccggctggcggaagaagcatgcccgcaacaaggtcgtgcgctttgagccggcatccgcgcagggtagcgcgtgctggaacccgctcgatgaaatccgcttggggaccgagtacgaggttggcgacgtgcagaaccttgccaccctgatcgtcgatccggacggcaagggcctggaatcgcactggcagaaaaccagccaggcgctgcttgtcggcgtcatcctgcacgcgctctacaaggctaagaacgagggtacgccggccaccctgccgtcggtggacggcatgcttgccgacccgaaccgcgacgtgggcgagctttggatggaaatgaccacctacggccacgttgacgggcagaaccaccctgcggtcggctctgcggcccgcgacatgatggaccgcccggaggaagaatccggttccgtgctgtccaccgccaagtcctacctggccctgtaccgcgacccggttgtggcccgcaacgtcagcaagtccgacttccgcatcaagcaactgatgcaccacgacgacccggtaagcctgttcatcgtgacgcagcccaacgacaaggcccgtctgcggcctctggtgcgcgtcatggtcaacatgatcgtccggctgctggccgacaagatggacttcgagaacggccgtcctgtcgcgcactacaagcatcgtctgctgatgatgctcgacgagttccccagcctgggcaagctcgaaatcctgcaagagtcccttgccttcgtcgccggctacggcatcaagtgctacctcatctgccaggacattaaccagctcaagagccgcgaaaccggctacggccacgacgaaagcatcacgtcgaactgccacgtgcagaacgcctacccgccgaaccgcgtggagacggccgagcacctgtcaaaactgacaggcaccacgaccatcgtgaaggagcagatcacgacgagcggccgccgcacgtcggcgctgttgggcaacgtctcgcggaccttccaggaagtgcagcggccattgctgacccccgatgaatgcctgcgcatgccggggccgaagaagagcgccgacggcagcattgaagaggcgggcgacatggttgtgtacgtcgccggctatcccgcgatctacggcaagcagccgctctacttcaaagacccgatattccaggcccgcgcggccgtaccggctccgaaggtcagcgacaagctgatccagacggccaccgtcgaggaaggggaggggatcacgatatgagccgcttccagcgcctcaccaagtacgtcgccatcggaggcggcgcggccttgttgctcgccggcgcggcctatctcgccggcgcgaaggtcaacaccaccaaaagcattccggtcggcctgtactggaaatcgaatgcgccggtggagaagggggcttacgtcatgttctgcccgccgcaagtcggcgtgttttcggacgccaaggagcggggctacatcgccggcggtttctgccccggcgactacggctacatgatgaagcgagttttagccgctaaaggcgacgaggttgccatcaccgacgccggcgtgcgcgtgaatggcgggctgctgcctcacagcgcgctcatcaaggccgatccatcaggacggccgctgcctcgttatcagtccgacagctacaccctggggaccgccgaggttctgcttatgtccgacgtaagcgacacgtctttcgacggccgctacttcgggcctgtcaatcgttcgcaaatcatcaccgtcatcaggccggttctgacctggtgataacctttttgcgtttctacaaactcttttgtttatttttctaaatacattcaaatatgtatccgctcatgagacaataaccctgataaatgcttcaataatattgaaaaaggaagagtatgagtattcaacatttccgtgtcgcccttattcccttttttgcggcattttgccttcctgtttttgctcacccagaaacgctggtgaaagtaaaagatgctgaagatcagttgggtgcacgagtgggttacatcgaactggatctcaacagcggtaagatccttgagagttttcgccccgaagaacgttttccaatgatgagcacttttaaagttctgctatgtggcgcggtattatcccgtgttgacgccgggcaagagcaactcggtcgccgcatacactattctcagaatgacttggttgagtactcaccagtcacagaaaagcatcttacggatggcatgacagtaagagaattatgcagtgctgccataaccatgagtgataacactgcggccaacttacttctgacaacgatcgtatagcttgccggaagtcgccttgacccgcatggcataggcctatcgtttccacgacgtatcacgaggccctttcgtcttcaagaattcgcggccgcaattaaccctcactaaaggatccgacgacctgcagctcacggtaactgatgccggtatttgcagtaccagcgtacggcccacagaatgatgtcacgctgaaaatgccggcctttgaatgggttcatgtgcagctccatcagcaaaaggggatgataagtttatcaccaccgactatttgcaacagtgccgttgatcgtgctatgatcgactgatgtcatcagcggtggagtgcaatgtcgtgcaatacgaatggcgaaaagccgagctcatcggtcagcttctcaaccttggggttacccccggcggtgtgctgctggtccacagctccttccgtagcgtccggcccctcgaagatgggccacttggactgatcgaggccctgcgtgctgcgctgggtccgggagggacgctcgtcatgccctcgtggtcaggtctggacgacgagccgttcgatcctgccacgtcgcccgttacaccggaccttggagttgtctctgacacattctggcgcctgccaaatgtaaagcgcagcgcccatccatttgcctttgcggcagcggggccacaggcagagcagatcatctctgatccattgcccctgccacctcactcgcctgcaagcccggtcgcccgtgtccatgaactcgatgggcaggtacttctcctcggcgtgggacacgatgccaacacgacgctgcatcttgccgagttgatggcaaaggttccctatggggtgccgagacactgcaccattcttcaggatggcaagttggtacgcgtcgattatctcgagaatgaccactgctgtgagcgctttgccttggcggacaggtggctcaaggagaagagccttcagaaggaaggtccagtcggtcatgcctttgctcggttgatccgctcccgcgacattgtggcgacagccctgggtcaactgggccgagatccgttgatcttcctgcatccgccagaggcgggatgcgaagaatgcgatgccgctcgccagtcgattggctgatcaggacggtctcgcggtatcattgcagcactggggccagatggtaagccctcccgtatcgtagttatctacacgacggggagtcaggcaactatggatgaacgaaatagacagatcgctgagataggtgcctcactgattaagcattggtaactgtcagaccaagtttactcatatatactttagattgatttacgcgccctgtagcggcgcattaagcgcggcgggtgtggtggttacgcgcagcgtgaccgctacacttgccagcgccctagcgcccgctcctttcgctttcttcccttcctttctcgccacgttcgccggctttccccgtcaagctctaaatcgggggctccctttagggttccgatttagtgctttacggcacctcgaccccaaaaaacttgatttgggtgatggttcacgtagtgggccatcgccctgatagacggtttttcgccctttgacgttggagtccacgttctttaatagtggactcttgttccaaacttgaacaacactcaaccctatctcgggctattcttttgatttataagtcgacagcgacacacttgcatcggatgcagcccggttaacgtgccggcacggcctgggtaaccaggtattttgtccacataaccgtgcgcaaaatgttgtggataagcaggacacagcagcaatccacagcaggcatacaaccgcacaccgaggttactccgttctacaggttacgacgacatgtcaatacttgcccttgacaggcattgatggaatcgtagtctcacgctgatagtctgatcgacaatacaagtgggaccgtggtcccagaccgataatcagaccgacaacacgagtgggatcgtggtcccagactaataatcagaccgacgatacgagtgggaccgtggtcccagactaataatcagaccgacgatacgagtgggaccgtggttccagactaataatcagaccgacgatacgagtgggaccgtggtcccagactaataatcagaccgacgatacgagtgggaccatggtcccagactaataatcagaccgacgatacgagtgggaccgtggtcccagtctgattatcagaccgacgatacgagtgggaccgtggtcccagactaataatcagaccgacgatacgagtgggaccgtggtcccagactaataatcagaccgacgatacgagtgggaccgtggtcccagtctgattatcagaccgacgatacaagtggaacagtgggcccagagagaatattcaggccagttatgctttctggcctgtaacaaaggacattaagtaaagacagataaacgtagactaaaacgtggtcgcatcagggtgctggcttttcaagttccttaagaatggcctcaattttctctatacactcagttggaacacgagacctgtccaggttaagcaccattttatcgcccttatacaatactgtcgctccaggagcaaactgatgtcgtgagcttaaactagttcttgatgcagatgacgttttaagcacagaagttaaaagagtgataacttcttcagcttcaaatatcaccccagcttttttctgctcatgaaggttagatgcctgctgcttaagtaattcctctttatctgtaaaggctttttgaagtgcatcacctgaccgggcagatagttcaccggggtgagaaaaaagagcaacaactgatttaggcaatttggcggtgttgatacagcgggtaataatcttacgtgaaatattttccgcatcagccagcgcagaaatatttccagcaaattcattctgcaatcggcttgcataacgctgaccacgttcataagcacttgttgggcgataatcgttacccaatctggataatgcagccatctgctcatcatccagctcgccaaccagaacacgataatcactttcggtaagtgcagcagctttacgacggcgactcccatcggcaatttctatgacaccagatactcttcgaccgaacgccggtgtctgttgaccagtcagtagaaaagaagggatgagatcatccagtgcgtcctcagtaagcagctcctggtcacgttcattacctgaccatacccgagaggtcttctcaacactatcaccccggagcacttcaagagtaaacttcacatcccgaccacatacaggcaaagtaatggcattaccgcgagccattactcctacgcgcgcaattaacgaatccaccatcggggcagctggtgtcgataacgaagtatcttcaaccggttgagtattgagcgtatgttttggaataacaggcgcacgcttcattatctaatctcccagcgtggtttaatcagacgatcgaaaatttcattgcagacaggttcccaaatagaaagagcatttctccaggcaccagttgaagagcgttgatcaatggcctgttcaaaaacagttctcatccggatctgacctttaccaacttcatccgtttcacgtacaacattttttagaaccatgcttccccaggcatcccgaatttgctcctccatccacggggactgagagccattactattgctgtatttggtaagcaaaatacgtacatcaggctcgaaccctttaagatcaacgttcttgagcagatcacgaagcatatcgaaaaactgcagtgcggaggtgtagtcaaacaactcagcaggcgtgggaacaatcagcacatcagcagcacatacgacattaatcgtgccgatacccaggttaggcgcgctgtcaataactatgacatcatagtcatgagcaacagtttcaatggccagtcggagcatcaggtgtggatcggtgggcagtttaccttcatcaaatttgcccattaactcagtttcaatacggtgcagagccagacaggaaggaataatgtcaagccccggccagcaagtgggctttattgcataagtgacatcgtccttttccccaagatagaaaggcaggagagtgtcttctgcatgaatatgaagatctggtacccatccgtgatacattgaggctgttccctgggggtcgttaccttccacgagcaaaacacgtagccccttcagagccagatcctgagcaagatgaacagaaactgaggttttgtaaacgccacctttatgggcagcaaccccgatcaccggtggaaatacgtcttcagcacgtcgcaatcgcgtaccaaacacatcacgcatatgattaatttgttcaattgtataaccaacacgttgctcaacccgtcctcgaatttccatatccgggtgcggtagtcgccctgctttctcggcatctctgatagcctgagaagaaaccccaactaaatccgctgcttcacctattctccagcgccgggttattttcctcgcttccgggctgtcatcattaaactgtgcaatggcgatagccttcgtcatttcatgaccagcgtttatgcactggttaagtgtttccatgagtttcattctgaacatcctttaatcattgctttgcgtttttttattaaatcttgcaatttactgcaaagcaacaacaaaatcgcaaagtcatcaaaaaaccgcaaagttgtttaaaataagagcaacactacaaaaggagataagaagagcacatacctcagtcacttattatcactagcgctcgccgcagccgtgtaaccgagcatagcgagcgaactggcgaggaagcaaagaagaactgttctgtcagatagctcttacgctcagcgcaagaagaaatatccaccgtgggaaaaactccaggtagaggtacacacgcggatagccaattcagagtaataaactgtgataatcaaccctcatcaatgatgacgaactaacccccgatatcaggtcacatgacgaagggaaagagaaggaaatcaactgtgacaaactgccctcaaatttggcttccttaaaaattacagttcaaaaagtatgagaaaatccatgcaggctgaaggaaacagcaaaactgtgacaaattaccctcagtaggtcagaacaaatgtgacgaaccaccctcaaatctgtgacagataaccctcagactatcctgtcgtcatggaagtgatatcgcggaaggaaaatacgatatgagtcgtctggcggcctttctttttctcaatgtatgagaggcgcattggagttctgctgttgatctcattaacacagacctgcaggaagcggcggcggaagtcaggcatacgctggtaactttgaggcagctggtaacgctctatgatccagtcgattttcagagagacgatgcctgagccatccggcttacgatactgacacagggattcgtataaacgcatggcatacggattggtgatttcttttgtttcactaagccgaaactgcgtaaaccggttctgtaacccgataaagaagggaatgagatatgggttgatatgtacactgtaaagccctctggatggactgtgcgcacgtttgataaaccaaggaaaagattcatagcctttttcatcgccggcatcctcttcagggcgataaaaaaccacttccttccccgcgaaactcttcaatgcctgccgtatatccttactggcttccgcagaggtcaatccgaatatttcagcatatttagcaacatggatctcgcagataccgtcatgttcctgtagggtgccatcagattttctgatctggtcaacgaacagatacagcatacgtttttgatcccgggagagactatatgccgcctcagtgaggtcgtttgactggacgattcgcgggctatttttacgtttcttgtgattgataaccgctgtttccgccatgacagatccatgtgaagtgtgacaagtttttagattgtcacactaaataaaaaagagtcaataagcagggataactttgtgaaaaaacagcttcttctgagggcaatttgtcacagggttaagggcaatttgtcacagacaggactgtcatttgagggtgatttgtcacactgaaagggcaatttgtcacaacaccttctctagaaccagcatggataaaggcctacaaggcgctctaaaaaagaagatctaaaaactataaaaaaaataattataaaaatatccccgtggataagtggataaccccaagggaagttttttcaggcatcgtgtgtaagcagaatatataagtgctgttccctggtgcttcctcgctcactcgagggcttcgccctgtcgctcgactgcggcgagcactactggctgtaaaaggacagaccacatcatggttctgtgttcattaggttgttctgtccattgctgacataatccgctccacttcaacgtaacaccgcacgaagatttctattgttcctgaaggcatattcaaatcgttttcgttaccgcttgcaggcatcatgacagaacactacttcctataaacgctacacaggctcctgagattaataatgcggatctctacgataatgggagattttcccgactgtttcgttcgcttctcagtggataacagccagcttctctgtttaacagacaaaaacagcatatccactcagttccacatttccatataaaggccaaggcatttattctcaggataattgtttcagcatcgcaaccgcatcagactccggcatcgcaaactgcacccggtgccgggcagccacatccagcgcaaaaaccttcgtgtagacttccgttgaactgatggacttatgtcccatcaggctttgcagaactttcagcggtataccggcatacagcatgtgcatcgcataggaatggcggaacgtatgtggtgtgaccggaacagagaacgtcacaccgtcagcagcagcggcggcaaccgcctccccaatccaggtcctgaccgttctgtccgtcacttcccagatccgcgctttctctgtccttcctgtgcgacggttacgccgctccat

SEQ ID NO: 3 - DNA, 11912 bp, synthetic construct
  source 1..11912: mol_type = other DNA
ttttctactgaaccgctctagatttcagtgcaatttatctcttcaaatgtagcacctgaagtcagccccatacgatataagttgtaattctcatgttagtcatgccccgcgcccaccggaaggagctgactgggttgaaggctctcaagggcatcggtcgcacgcttgtgttgacagctagctcagtcctaggtataatactagtcacgtgaactgccgagtaggtagctgataacgagacctctgtcttgtcagctagggtggtctcgtgaactgccgagtaggtagctgataactcgagagatccggctgctaacaaacccgcttaaggaagatggccaacttatttacataaggctgctgccaccgctgagcaataactagcataaccccttggggcctctaaacgggtcttgaggggttttttggtttaaacccatctaattgggaattccccctgcctcgcgcgtttcggtgatgacggtgaaaacctctgacacagcgatcgcttatgacaacttgacggctacatcattcactttttcttcacaaccggcacggaactcgctcgggctggccccggtgcattttttaaatacccgcgagaaatagagttgatcgtcaaaaccaacattgcgaccgacggtggcgataggcatccgggtggtgctcaaaagcagcttcgcctggctgatacgttggtcctcgcgccagcttaagacgctaatccctaactgctggcggaaaagatgtgacagacgcgacggcgacaagcaaacatgctgtgcgacgctggcgatatcaaaattgctgtctgccaggtgatcgctgatgtactgacaagcctcgcgtacccgattatccatcggtggatggagcgactcgttaatcgcttccatgcgccgcagtaacaattgctcaagcagatttatcgccagcagctccgaatagcgcccttccccttgcccggcgttaatgatttgcccaaacaggtcgctgaaatgcggctggtgcgcttcatccgggcgaaagaaccccgtattggcaaatattgacggccagttaagccattcatgccagtaggcgcgcggacgaaagtaaacccactggtgataccattcgcgagcctccggatgacgaccgtagtgatgaatctctcctggcgggaacagcaaaatatcacccggtcggcaaacaaattctcgtccctgatttttcaccaccccctgaccgcgaatggtgagattgagaatataacctttcattcccagcggtcggtcgataaaaaaatcgagataaccgttggcctcaatcggcgttaaacccgccaccagatgggcattaaacgagtatcccggcagcaggggatcattttgcgcttcagccatacttttcatactcccgccattcagagaagaaaccaattgtccatattgcatcagacattgccgtcactgcgtcttttactggctcttctcgctaaccaaaccggtaaccccgcttattaaaagcattctgtaacaaagcgggaccaaagccatgacaaaaacgcgtaacaaaagtgtctataatcacggcagaaaagtccacattgattatttgcacggcgtcacactttgctatgccatagcatttttatccataagattagcggatcctacctgacgctttttatcgcaactctctactgtttctccatacccgggatccgaattcgagcgaaggagatatacatatgtttttgcaaagacctaaaccttacagcgatgaaagtttagaaagtttctttatccgagtggctaacaaaaatggctacggtgatgtccatcgcttcctagaagccactaaacgattccttcaagacattgaccataatggctatcaaacctttccgactgatataactcggataaacccatactcagctaaaaacagttccagcgcacgaactgcgtcattcctgaaacttgcacaattgacatttaatgaaccgccagagctacttgggttggcaattaacagaacaaacatgaaatactcgccgtcaactagcgcggttgttagaggtgcagaagtctttcctcgcagtttactacggacgcactccatcccctgctgtcctttgtgtctgcgagaaaatggctacgcctcctacctttggcactttcaggggtacgaatactgccacagccataacgtacctttaattaccacttgtagctgtggtaaggagtttgactaccgagtatctgggttaaagggcatttgctgcaaatgcaaggagcctatcaccttaaccagcagggagaacggtcatgaggcagcgtgtactgtttcaaactggcttgctggccatgaatctaaacctctgccaaatcttcctaaaagctaccgatggggtttagttcattggtggatgggtattaaagatagcgagttcgatcacttttcgttcgttcaatttttctcaaactggccaaggtcattccactcgataatcgaagatgaagtagagttcaaccttgagcatgctgttgtcagcacgtctgaattacgactaaaagatcttcttggtcgattgtttttcggttcaattcggttacctgagcggaatcttcaacacaatatcatccttggtgagcttctctgctatttagaaaatcgtttatggcaagacaagggattaatcgccaacctcaaaatgaacgcgttagaggcgactgtaatgttaaattgtagcctcgatcagattgcatcaatggttgaacaacgcatcttgaagccaaatcgaaaaagcaagcccaacagccctcttgatgttaccgattatctatttcatttcggcgatattttctgtctttggttagctgagttccaaagcgatgagtttaaccgttcgttttatgtgtcgaggtggtaaatgcaaactctgaaagaactaatcgcatccaatcctgacgacttaacaactgaacttaagagagcatttcgtccactcacaccgcatattgcaattgatggtaatgaacttgacgcactgacgatattagtcaatttaaccgataagactgatgatcagaaagacctgctcgatcgagccaaatgcaagcaaaaacttcgagatgaaaaatggtgggctagctgcataaattgcgttaattacagacaaagccataacccaaaattcccggatatacgttctgaaggcgtgattcgaacccaagccctgggtgaattaccgagtttcctactctcgtcctcaaaaatcccaccataccattggtcatatagccatgattcaaaatacgtcaacaaaagcgcattcctcaccaatgagttttgttgggatggtgagatctcatgtttgggtgagcttcttaaagatgcagatcacccactttggaatactttgaaaaagttaggttgttctcaaaaaacttgcaaagcaatggcaaaacaactagctgatattactctcacgactatcaatgtcacactcgcaccaaattacctgactcaaatatctctccccgatagtgatacatcctacatttcactctctcctgttgcatcgctatcgatgcaaagccactttcatcagaggctccaagatgaaaatcggcatagcgcgataacgcggtttagccgaactaccaacatgggggtcactgcgatgacatgtggcggcgcatttagaatgttaaagtctggcgctaagttttccagcccccctcatcaccgattaaacagtaaacgaagttggttgacgtcagagcatgttcagtcattaaaacagtaccagcgcctcaacaaaagcctcatacctgaaaactctcggattgcactccgtagaaaatacaaaatcgagcttcaaaatatggtcagatcttggtttgcaatgcaagaccatacccttgattcgaacatacttatccaacatttgaatcatgacctatcttacttaggagccacaaaacgttttgcatacgatccagcgatgaccaagctctttactgagcttttgaaacgagagttatcaaattcaatcaataatggtgagcaacacactaatggatcgtttttagtcctaccgaatatcagggtttgtggcgcaacagctttaagctccccggtaacggtggggattccatcacttacagctttctttggcttcgttcacgcatttgaacggaatataaatcgcaccacctcatcgtttcgtgttgaatcctttgcgatatgcgtccatcaactacatgtcgagaagcgaggtttgacagcagagtttgtggaaaaaggcgacgggactatatccgctcccgcgacccgggatgactggcagtgtgatgtcgtatttagccttattttgaacaccaactttgctcaacatattgaccaagatacgttagttacatcactaccaaagcgattggctcggggttcagcaaaaattgcgattgatgactttaaacatatcaactcattctcgacattagaaacagcgatcgaatctctgccaatagaagctggtaggtggttatcactttacgcacagtcaaacaataatctaagtgatctattagcagccatgacagaggaccatcagctcatggcaagctgcgtcggttaccacttgttagaagagcccaaagataaaccaaactccctcagaggttacaaacacgctatcgccgagtgcatcattggactcattaactcaatcacctttagctcagagactgatcccaacacaatcttttggtcgctaaagaactatcaaaactacctagtggtacagccaaggagtatcaacgatgaaactaccgacaaatctagcctatgagcgctctatcgacccatcagatgtctgtttttttgtcgtctggcccgatgatagaaaaacacctttaacctacaattctcgtactctgctcgggcaaatggaagcggcatcattagcctatgatgtctcaggtcaaccaataaaaagtgccaccgctgaggcgttagctcaagggaaccctcatcaagttgatttctgccacgttccatacggtgcgagtcatattgaatgcagtttctccgtctcgttttcttctgaactacgtcaaccatataagtgtaactcaagcaaagttaaacaaacgctagtgcaattagtcgagctctacgaaacgaaaatcggctggactgagctagcaacccgatatttgatgaacatttgcaacggtaaatggctgtggaaaaatacccgtaaagcctattgctggaacattgtacttacaccttggccttggaacggggaaaaggttggatttgaagatattcgtactaactacacctcacggcaagactttaaaaataataaaaattggtctgctatagttgaaatgatcaaaaccgcattttctagtactgatgggctggcgatatttgaagtcagggccaccttgcacttgccaacgaatgctatggtgcggccaagccaagttttcacagaaaaagaaagtggcagtaaaagtaaatctaaaactcaaaacagtcgagtttttcagagtacaactattgatggtgaacgatcgccaatactaggggcctttaaaacgggagcagctattgcaaccattgacgactggtatcctgaagccactgagccactaagggtcggacggtttggggttcatcgcgaagatgtcacttgctaccgtcatccgtctaccggaaaagattttttctcgatattacaacaagcagagcactatattgaagtgttgagcgccaacaaaactcccgctcaagaaactatcaacgacatgcactttttaatggctaacctgattaagggtgggatgttccagcataaaggagactgactgtgaaatggtattataagacaatcacctttctgccagagttgtgcaacaacgagtcactggctgcaaagtgtctccgcgttctgcatggatttaactatcagtatgagacacgaaatatcggcgtttcatttccgctttggtgtgatgcaacggttggaaaaaagatttcatttgtcagcaagaacaagatagaactcgacttactacttaaacaacactatttcgtccaaatggaacaacttcaatactttcatatatccaacactgttctcgtcccagaagattgtacatacgtttcctttagacgctgtcaatctatagataagctcacagcagcagggctggcaaggaaaatcagacgcctggagaaacgtgctctatctagaggcgagcaatttgacccatcatcttttgctcaaaaagagcatactgcaatagcgcactaccactcacttggggagtccagcaaacagacgaaccgcaactttcgactcaatatcaggatgctctcggagcaaccccgtgaggggaactcgatttttagtagctatggcttatcaaattcagaaaactcgtttcagcctgtacccttaatctgacctttaataaggagatataccatggcgacaagtttacctacgccctcagcaattacgacttcggcgttagagtatgcattccatactcccgctcgcaatctaacgaaatctcgcggaaaaaacattcatcgttatgtcagtgtaaagatgagtaagaggattacggtagaatctactctagagtgtgatgcctgctatcactttgattttgagccaagtattgttcgcttttgcgctcaaccgattcgatttttatattatctcaatggtcagtctcactcctatgttcctgactttctagttcaatttgataccaacgagtttgttctatatgaagtaaagtcagcttatgctaagaacaaacctgattttgatgttgaatgggaggcgaaagtaaaagcagcaactgaactagggctagaattggagcttgttgaagagagtgatattagggatacggttgtattaaataatcttaagcgcatgcatcgttatgcttcgaaagatgagctgaataacgtacataactctctcttaaaaataataaagtacaatggcgcccaatctgcaagatgcttgggagaacagttgggtttaaaaggccgaactgttttaccaattttgtgcgatttgctgtcaaggtgtttactcgatacacgtttggataagcctctatctcttgaatctcgatttgagttggccagttatggctaagaaagggttctcaagtttccatagaaaagcagtctcttcccaagatacgcttgaatcgatagagcttgtctctagcgctaattgtctagaaagtgttacgtatcaagatatatcagcatttcccgaaacaattgcggtagagattaatttccgattaagcattcttcgctttttagcgcgaaagtgcgaaaccattgtggccaaatcaattgaaccacatcgtgtagagctacagcaaaactatagtagaaaaatacccagtgcaataacgatatatcgatggtggcttgcttttcgaaaatcagactacaaccccattagcttagcacctaatatcaaggatagaggtaatagagagacaaaagtgtcaacagttgttgattctattatggaacaggcagttgaaagagttatatctggacgaaaagtcaatgttagctctgcatataaacgtgttcgacgaaaagttcgtcaatacaatctaactcatggaacgaaatacacgtatcctaagtacgaatctgtaagaaagcgagtaaaaaagaaaaccccatttgagttattagccgcagggaaaggggagagagtagctaagagagagtttcgccgaatgggaaaaaagatcctcacgtctagcgtgctagagagggttgaaatagatcacactgtcgttgacctttttgcagtacacgaagagtatcgaatcccattgggccgaccttggcttactcaattggttgattgttacagtaaagctgtaatcggtttttatttaggtttcgagcctcctagctatgtgtcggtttcccttgcacttaagaatgcaatacaacgcaaagatgacttaatctcctcgtatgaatcgatcgagaatgaatggctatgttatggcatcccagacctactcgtaactgataatggtaaagagtttttgtcgaaagcatttgatcaagcatgtgaatcactattgatcaatgtgcatcaaaataaagttgagacgcccgacaacaaacctcatgttgaacgtaactacgggactattaatacttctctgttagacgatttacctgggaaatccttcagccagtaccttcaaagagaagggtacgactctgtgggagaagctacccttacactcaatgagattagagaaatttacttaatttggttggtggatatttatcataaaaaacccaatcagagaggcactaattgtcctaatgttgcgtggaaaaagggttgtcaagaatgggaaccagaggagttctctggttctaaagacgaattagactttaaatttgctattgttgattacaaacaacttactaaagtagggataactgtctacaaagaactgagttatagcaatgaccgtttagctgaatatagagggaagaaaggaaaccataaagttcagttcaagtataaccctgagtgtatggcagttatttgggtgttggatgaggatatgaatgagtactttacagttaatgcgattgactacgaatatgcaagtagagtatcactttggcaacataaatataacatgaaatatcaagcagaactaaattcagcagaatatgatgaggacaaggaaattgatgcagaaataaaaattgaagaaatcgcagatcgttcaattgttaagactaacaaaatcagagctcggaggcgtggcgctaggcatcaagagaatagcgcaagggctaagtcaatcagtaatgcgaacccggcctcgatacaaaaacatgaagatgaaatcgttagtgcagataatgacgattgggatattgattatgtctgagaaatcgtcaaatgagtgaaacgcgtgaggctcgtatatcaagagctaaaagggcatttgtatccacaccgagcgttaggaaaatcttgagttacatggatagatgtagagatctatcagacctagagtctgagcctacatgcatgatggtctatggtgcttcgggtgtaggtaaaacgaccgtcatcaagaaatacttaaatcaaaacagaagagagtccgaagccgggggcgatataataccggttttgcatattgagttgccagacaatgcgaagccagtagatgcagcaagggaattgctggttgaaatgggtgacccgctagcactttatgaaactgacttagctagattgacgaaaagactgactgaattaatccctgcggtcggcgtgaagctgattattatcgatgagttccaacatttggtggaagaaaggtcaaatcgggttcttacccaagtaggtaattggctaaaaatgatacttaacaaaacgaaatgtccaattgttatatttggtatgccatactcaaaagttgtactgcaagcaaactcgcaacttcacgggcgattttccattcaggttgaactgcgcccctttagctaccagggaggtagaggtgtatttaaaacttttttggaataccttgataaagccctaccttttgaaaaacaggctggcttagccaacgaaagtttgcagaaaaaattgtatgcattctctcagggaaacatgcgttcgttgagaaaccttatttatcaagcatctatcgaagcaattgataatcagcatgagacgataaccgaagaagatttcgtttttgcatcgaagttgacatcgggcgataaacccaactcatggaaaaatccttttgaggagggtgttgaggtaacagaagatatgttacgaccgccaccaaaagatattggttgggaggactatttgagacattcaaccccgagagtgagtaaaccaggtagaaataaaaactttttcgaataacctaggctgctgcgctgctgccaccgctgagcaataactagcataaccccttggggcctctaaacgggtcttgaggggttttttgctgaaacctcaggcattgaacctgcacggtaccgagctcgaattcactggccgtcgttttacaacgtcgtgactgggaaaaccctggcgttacccaacttaatcgccttgctatcgtggccggatcttgcggcccctcggcttgaacgaattgttagacattatttgccgactaccttggtgatctcgcctttcacgtagtggacaaattcttccaactgatctgcgcgcgaggccaagcgatcttcttcttgtccaagataagcctgtctagcttcaagtatgacgggctgatactgggccggcaggcgctccattgcccagtcggcagcgacatccttcggcgcgattttgccggttactgcgctgtaccaaatgcgggacaacgtaagcactacatttcgctcatcgccagcccagtcgggcggcgagttccatagcgttaaggtttcatttagcgcctcaaatagatcctgttcaggaaccggatcaaagagttcctccgccgctggacctaccaaggcaacgctatgttctcttgcttttgtcagcaagatagccagatcaatgtcgatcgtggctggctcgaagatacctgcaagaatgtcattgcgctgccattctccaaattgcagttcgcgcttagctggataacgccacggaatgatgtcgtcgtgcacaacaatggtgacttctacagcgcggagaatctcgctctctccaggggaagccgaagtttccaaaaggtcgttgatcaaagctcgccgcgttgtttcatcaagccttacggtcaccgtaaccagcaaatcaatatcactgtgtggcttcaggccgccatccactgcggagccgtacaaatgtacggccagcaacgtcggttcgagatggcgctcgatgacgccaactacctctgatagttgagtcgatacttcggcgatcaccgcttccctcatactcttcctttttcaatattattgaagcatttatcagggttattgtctcatgagcggatacatatttgaatgtatttagaaaaataaacaaatagctagctcactcggtcgctacgctccgggcgtgagactgcggcgggcgctgcggacacatacaaagttacccacagattccgtggataagcaggggactaacatgtgaggcaaaacagcagggccgcgccggtggcgtttttccataggctccgccctcctgccagagttcacataaacagacgcttttccggtgcatctgtgggagccgtgaggctcaaccatgaatctgacagtacgggcgaaacccgacaggacttaaagatccccaccgtttccggcgggtcgctccctcttgcgctctcctgttccgaccctgccgtttaccggatacctgttccgcctttctcccttacgggaagtgtggcgctttctcatagctcacacactggtatctcggctcggtgtaggtcgttcgctccaagctgggctgtaagcaagaactccccgttcagcccgactgctgcgccttatccggtaactgttcacttgagtccaacccggaaaagcacggtaaaacgccactggcagcagccattggtaactgggagttcgcagaggatttgtttagctaaacacgcggttgctcttgaagtgtgcgccaaagtccggctacactggaaggacagatttggttgctgtgctctgcgaaagccagttaccacggttaagcagttccccaactgacttaaccttcgatcaaaccacctccccaggtggttttttcgtttacagggcaaaagattacgcgcagaaaaaaaggatctcaagaagatcctttgatc

SEQ ID NO: 4 - DNA, 11912 bp, synthetic construct
  source 1..11912: mol_type = other DNA
ttttctactgaaccgctctagatttcagtgcaatttatctcttcaaatgtagcacctgaagtcagccccatacgatataagttgtaattctcatgttagtcatgccccgcgcccaccggaaggagctgactgggttgaaggctctcaagggcatcggtcgcacgcttgtgttgacagctagctcagtcctaggtataatactagtcacgtgaactgccgagtaggtagctgataacaccagacccgcgagcattaattcttgcctccagtgaactgccgagtaggtagctgataactcgagagatccggctgctaacaaacccgcttaaggaagatggccaacttatttacataaggctgctgccaccgctgagcaataactagcataaccccttggggcctctaaacgggtcttgaggggttttttggtttaaacccatctaattgggaattccccctgcctcgcgcgtttcggtgatgacggtgaaaacctctgacacagcgatcgcttatgacaacttgacggctacatcattcactttttcttcacaaccggcacggaactcgctcgggctggccccggtgcattttttaaatacccgcgagaaatagagttgatcgtcaaaaccaacattgcgaccgacggtggcgataggcatccgggtggtgctcaaaagcagcttcgcctggctgatacgttggtcctcgcgccagcttaagacgctaatccctaactgctggcggaaaagatgtgacagacgcgacggcgacaagcaaacatgctgtgcgacgctggcgatatcaaaattgctgtctgccaggtgatcgctgatgtactgacaagcctcgcgtacccgattatccatcggtggatggagcgactcgttaatcgcttccatgcgccgcagtaacaattgctcaagcagatttatcgccagcagctccgaatagcgcccttccccttgcccggcgttaatgatttgcccaaacaggtcgctgaaatgcggctggtgcgcttcatccgggcgaaagaaccccgtattggcaaatattgacggccagttaagccattcatgccagtaggcgcgcggacgaaagtaaacccactggtgataccattcgcgagcctccggatgacgaccgtagtgatgaatctctcctggcgggaacagcaaaatatcacccggtcggcaaacaaattctcgtccctgatttttcaccaccccctgaccgcgaatggtgagattgagaatataacctttcattcccagcggtcggtcgataaaaaaatcgagataaccgttggcctcaatcggcgttaaacccgccaccagatgggcattaaacgagtatcccggcagcaggggatcattttgcgcttcagccatacttttcatactcccgccattcagagaagaaaccaattgtccatattgcatcagacattgccgtcactgcgtcttttactggctcttctcgctaaccaaaccggtaaccccgcttattaaaagcattctgtaacaaagcgggaccaaagccatgacaaaaacgcgtaacaaaagtgtctataatcacggcagaaaagtccacattgattatttgcacggcgtcacactttgctatgccatagcatttttatccataagattagcggatcctacctgacgctttttatcgcaactctctactgtttctccatacccgggatccgaattcgagcgaaggagatatacatatgtttttgcaaagacctaaaccttacagcgatgaaagtttagaaagtttctttatccgagtggctaacaaaaatggctacggtgatgtccatcgcttcctagaagccactaaacgattccttcaagacattgaccataatggctatcaaacctttccgactgatataactcggataaacccatactcagctaaaaacagttccagcgcacgaactgcgtcattcctgaaacttgcacaattgacatttaatgaaccgccagagctacttgggttggcaattaacagaacaaacatgaaatactcgccgtcaactagcgcggttgttagaggtgcagaagtctttcctcgcagtttactacggacgcactccatcccctgctgtcctttgtgtctgcgagaaaatggctacgcctcctacctttggcactttcaggggtacgaatactgccacagccataacgtacctttaattaccacttgtagctgtggtaaggagtttgactaccgagtatctgggttaaagggcatttgctgcaaatgcaaggagcctatcaccttaaccagcagggagaacggtcatgaggcagcgtgtactgtttcaaactggcttgctggccatgaatctaaacctctgccaaatcttcctaaaagctaccgatggggtttagttcattggtggatgggtattaaagatagcgagttcgatcacttttcgttcgttcaatttttctcaaactggccaaggtcattccactcgataatcgaagatgaagtagagttcaaccttgagcatgctgttgtcagcacgtctgaattacgactaaaagatcttcttggtcgattgtttttcggttcaattcggttacctgagcggaatcttcaacacaatatcatccttggtgagcttctctgctatttagaaaatcgtttatggcaagacaagggattaatcgccaacctcaaaatgaacgcgttagaggcgactgtaatgttaaattgtagcctcgatcagattgcatcaatggttgaacaacgcatcttgaagccaaatcgaaaaagcaagcccaacagccctcttgatgttaccgattatctatttcatttcggcgatattttctgtctttggttagctgagttccaaagcgatgagtttaaccgttcgttttatgtgtcgaggtggtaaatgcaaactctgaaagaactaatcgcatccaatcctgacgacttaacaactgaacttaagagagcatttcgtccactcacaccgcatattgcaattgatggtaatgaacttgacgcactgacgatattagtcaatttaaccgataagactgatgatcagaaagacctgctcgatcgagccaaatgcaagcaaaaacttcgagatgaaaaatggtgggctagctgcataaattgcgttaattacagacaaagccataacccaaaattcccggatatacgttctgaaggcgtgattcgaacccaagccctgggtgaattaccgagtttcctactctcgtcctcaaaaatcccaccataccattggtcatatagccatgattcaaaatacgtcaacaaaagcgcattcctcaccaatgagttttgttgggatggtgagatctcatgtttgggtgagcttcttaaagatgcagatcacccactttggaatactttgaaaaagttaggttgttctcaaaaaacttgcaaagcaatggcaaaacaactagctgatattactctcacgactatcaatgtcacactcgcaccaaattacctgactcaaatatctctccccgatagtgatacatcctacatttcactctctcctgttgcatcgctatcgatgcaaagccactttcatcagaggctccaagatgaaaatcggcatagcgcgataacgcggtttagccgaactaccaacatgggggtcactgcgatgacatgtggcggcgcatttagaatgttaaagtctggcgctaagttttccagcccccctcatcaccgattaaacagtaaacgaagttggttgacgtcagagcatgttcagtcattaaaacagtaccagcgcctcaacaaaagcctcatacctgaaaactctcggattgcactccgtagaaaatacaaaatcgagcttcaaaatatggtcagatcttggtttgcaatgcaagaccatacccttgattcgaacatacttatccaacatttgaatcatgacctatcttacttaggagccacaaaacgttttgcatacgatccagcgatgaccaagctctttactgagcttttgaaacgagagttatcaaattcaatcaataatggtgagcaacacactaatggatcgtttttagtcctaccgaatatcagggtttgtggcgcaacagctttaagctccccggtaacggtggggattccatcacttacagctttctttggcttcgttcacgcatttgaacggaatataaatcgcaccacctcatcgtttcgtgttgaatcctttgcgatatgcgtccatcaactacatgtcgagaagcgaggtttgacagcagagtttgtggaaaaaggcgacgggactatatccgctcccgcgacccgggatgactggcagtgtgatgtcgtatttagccttattttgaacaccaactttgctcaacatattgaccaagatacgttagttacatcactaccaaagcgattggctcggggttcagcaaaaattgcgattgatgactttaaacatatcaactcattctcgacattagaaacagcgatcgaatctctgccaatagaagctggtaggtggttatcactttacgcacagtcaaacaataatctaagtgatctattagcagccatgacagaggaccatcagctcatggcaagctgcgtcggttaccacttgttagaagagcccaaagataaaccaaactccctcagaggttacaaacacgctatcgccgagtgcatcattggactcattaactcaatcacctttagctcagagactgatcccaacacaatcttttggtcgctaaagaactatcaaaactacctagtggtacagccaaggagtatcaacgatgaaactaccgacaaatctagcctatgagcgctctatcgacccatcagatgtctgtttttttgtcgtctggcccgatgatagaaaaacacctttaacctacaattctcgtactctgctcgggcaaatggaagcggcatcattagcctatgatgtctcaggtcaaccaataaaaagtgccaccgctgaggcgttagctcaagggaaccctcatcaagttgatttctgccacgttccatacggtgcgagtcatattgaatgcagtttctccgtctcgttttcttctgaactacgtcaaccatataagtgtaactcaagcaaagttaaacaaacgctagtgcaattagtcgagctctacgaaacgaaaatcggctggactgagctagcaacccgatatttgatgaacatttgcaacggtaaatggctgtggaaaaatacccgtaaagcctattgctggaacattgtacttacaccttggccttggaacggggaaaaggttggatttgaagatattcgtactaactacacctcacggcaagactttaaaaataataaaaattggtctgctatagttgaaatgatcaaaaccgcattttctagtactgatgggctggcgatatttgaagtcagggccaccttgcacttgccaacgaatgctatggtgcggccaagccaagttttcacagaaaaagaaagtggcagtaaaagtaaatctaaaactcaaaacagtcgagtttttcagagtacaactattgatggtgaacgatcgccaatactaggggcctttaaaacgggagcagctattgcaaccattgacgactggtatcctgaagccactgagccactaagggtcggacggtttggggttcatcgcgaagatgtcacttgctaccgtcatccgtctaccggaaaagattttttctcgatattacaacaagcagagcactatattgaagtgttgagcgccaacaaaactcccgctcaagaaactatcaacgacatgcactttttaatggctaacctgattaagggtgggatgttccagcataaaggagactgactgtgaaatggtattataagacaatcacctttctgccagagttgtgcaacaacgagtcactggctgcaaagtgtctccgcgttctgcatggatttaactatcagtatgagacacgaaatatcggcgtttcatttccgctttggtgtgatgcaacggttggaaaaaagatttcatttgtcagcaagaacaagatagaactcgacttactacttaaacaacactatttcgtccaaatggaacaacttcaatactttcatatatccaacactgttctcgtcccagaagattgtacatacgtttcctttagacgctgtcaatctatagataagctcacagcagcagggctggcaaggaaaatcagacgcctggagaaacgtgctctatctagaggcgagcaatttgacccatcatcttttgctcaaaaagagcatactgcaatagcgcactaccactcacttggggagtccagcaaacagacgaaccgcaactttcgactcaatatcaggatgctctcggagcaaccccgtgaggggaactcgatttttagtagctatggcttatcaaattcagaaaactcgtttcagcctgtacccttaatctgacctttaataaggagatataccatggcgacaagtttacctacgccctcagcaattacgacttcggcgttagagtatgcattccatactcccgctcgcaatctaacgaaatctcgcggaaaaaacattcatcgttatgtcagtgtaaagatgagtaagaggattacggtagaatctactctagagtgtgatgcctgctatcactttgattttgagccaagtattgttcgcttttgcgctcaaccgattcgatttttatattatctcaatggtcagtctcactcctatgttcctgactttctagttcaatttgataccaacgagtttgttctatatgaagtaaagtcagcttatgctaagaacaaacctgattttgatgttgaatgggaggcgaaagtaaaagcagcaactgaactagggctagaattggagcttgttgaagagagtgatattagggatacggttgtattaaataatcttaagcgcatgcatcgttatgcttcgaaagatgagctgaataacgtacataactctctcttaaaaataataaagtacaatggcgcccaatctgcaagatgcttgggagaacagttgggtttaaaaggccgaactgttttaccaattttgtgcgatttgctgtcaaggtgtttactcgatacacgtttggataagcctctatctcttgaatctcgatttgagttggccagttatggctaagaaagggttctcaagtttccatagaaaagcagtctcttcccaagatacgcttgaatcgatagagcttgtctctagcgctaattgtctagaaagtgttacgtatcaagatatatcagcatttcccgaaacaattgcggtagagattaatttccgattaagcattcttcgctttttagcgcgaaagtgcgaaaccattgtggccaaatcaattgaaccacatcgtgtagagctacagcaaaactatagtagaaaaatacccagtgcaataacgatatatcgatggtggcttgcttttcgaaaatcagactacaaccccattagcttagcacctaatatcaaggatagaggtaatagagagacaaaagtgtcaacagttgttgattctattatggaacaggcagttgaaagagttatatctggacgaaaagtcaatgttagctctgcatataaacgtgttcgacgaaaagttcgtcaatacaatctaactcatggaacgaaatacacgtatcctaagtacgaatctgtaagaaagcgagtaaaaaagaaaaccccatttgagttattagccgcagggaaaggggagagagtagctaagagagagtttcgccgaatgggaaaaaagatcctcacgtctagcgtgctagagagggttgaaatagatcacactgtcgttgacctttttgcagtacacgaagagtatcgaatcccattgggccgaccttggcttactcaattggttgattgttacagtaaagctgtaatcggtttttatttaggtttcgagcctcctagctatgtgtcggtttcccttgcacttaagaatgcaatacaacgcaaagatgacttaatctcctcgtatgaatcgatcgagaatgaatggctatgttatggcatcccagacctactcgtaactgataatggtaaagagtttttgtcgaaagcatttgatcaagcatgtgaatcactattgatcaatgtgcatcaaaataaagttgagacgcccgacaacaaacctcatgttgaacgtaactacgggactattaatacttctctgttagacgatttacctgggaaatccttcagccagtaccttcaaagagaagggtacgactctgtgggagaagctacccttacactcaatgagattagagaaatttacttaatttggttggtggatatttatcataaaaaacccaatcagagaggcactaattgtcctaatgttgcgtggaaaaagggttgtcaagaatgggaaccagaggagttctctggttctaaagacgaattagactttaaatttgctattgttgattacaaacaacttactaaagtagggataactgtctacaaagaactgagttatagcaatgaccgtttagctgaatatagagggaagaaaggaaaccataaagttcagttcaagtataaccctgagtgtatggcagttatttgggtgttggatgaggatatgaatgagtactttacagttaatgcgattgactacgaatatgcaagtagagtatcactttggcaacataaatataacatgaaatatcaagcagaactaaattcagcagaatatgatgaggacaaggaaattgatgcagaaataaaaattgaagaaatcgcagatcgttcaattgttaagactaacaaaatcagagctcggaggcgtggcgctaggcatcaagagaatagcgcaagggctaagtcaatcagtaatgcgaacccggcctcgatacaaaaacatgaagatgaaatcgttagtgcagataatgacgattgggatattgattatgtctgagaaatcgtcaaatgagtgaaacgcgtgaggctcgtatatcaagagctaaaagggcatttgtatccacaccgagcgttaggaaaatcttgagttacatggatagatgtagagatctatcagacctagagtctgagcctacatgcatgatggtctatggtgcttcgggtgtaggtaaaacgaccgtcatcaagaaatacttaaatcaaaacagaagagagtccgaagccgggggcgatataataccggttttgcatattgagttgccagacaatgcgaagccagtagatgcagcaagggaattgctggttgaaatgggtgacccgctagcactttatgaaactgacttagctagattgacgaaaagactgactgaattaatccctgcggtcggcgtgaagctgattattatcgatgagttccaacatttggtggaagaaaggtcaaatcgggttcttacccaagtaggtaattggctaaaaatgatacttaacaaaacgaaatgtccaattgttatatttggtatgccatactcaaaagttgtactgcaagcaaactcgcaacttcacgggcgattttccattcaggttgaactgcgcccctttagctaccagggaggtagaggtgtatttaaaacttttttggaataccttgataaagccctaccttttgaaaaacaggctggcttagccaacgaaagtttgcagaaaaaattgtatgcattctctcagggaaacatgcgttcgttgagaaaccttatttatcaagcatctatcgaagcaattgataatcagcatgagacgataaccgaagaagatttcgtttttgcatcgaagttgacatcgggcgataaacccaactcatggaaaaatccttttgaggagggtgttgaggtaacagaagatatgttacgaccgccaccaaaagatattggttgggaggactatttgagacattcaaccccgagagtgagtaaaccaggtagaaataaaaactttttcgaataacctaggctgctgcgctgctgccaccgctgagcaataactagcataaccccttggggcctctaaacgggtcttgaggggttttttgctgaaacctcaggcattgaacctgcacggtaccgagctcgaattcactggccgtcgttttacaacgtcgtgactgggaaaaccctggcgttacccaacttaatcgccttgctatcgtggccggatcttgcggcccctcggcttgaacgaattgttagacattatttgccgactaccttggtgatctcgcctttcacgtagtggacaaattcttccaactgatctgcgcgcgaggccaagcgatcttcttcttgtccaagataagcctgtctagcttcaagtatgacgggctgatactgggccggcaggcgctccattgcccagtcggcagcgacatccttcggcgcgattttgccggttactgcgctgtaccaaatgcgggacaacgtaagcactacatttcgctcatcgccagcccagtcgggcggcgagttccatagcgttaaggtttcatttagcgcctcaaatagatcctgttcaggaaccggatcaaagagttcctccgccgctggacctaccaaggcaacgctatgttctcttgcttttgtcagcaagatagccagatcaatgtcgatcgtggctggctcgaagatacctgcaagaatgtcattgcgctgccattctccaaattgcagttcgcgcttagctggataacgccacggaatgatgtcgtcgtgcacaacaatggtgacttctacagcgcggagaatctcgctctctccaggggaagccgaagtttccaaaaggtcgttgatcaaagctcgccgcgttgtttcatcaagccttacggtcaccgtaaccagcaaatcaatatcactgtgtggcttcaggccgccatccactgcggagccgtacaaatgtacggccagcaacgtcggttcgagatggcgctcgatgacgccaactacctctgatagttgagtcgatacttcggcgatcaccgcttccctcatactcttcctttttcaatattattgaagcatttatcagggttattgtctcatgagcggatacatatttgaatgtatttagaaaaataaacaaatagctagctcactcggtcgctacgctccgggcgtgagactgcggcgggcgctgcggacacatacaaagttacccacagattccgtggataagcaggggactaacatgtgaggcaaaacagcagggccgcgccggtggcgtttttccataggctccgccctcctgccagagttcacataaacagacgcttttccggtgcatctgtgggagccgtgaggctcaaccatgaatctgacagtacgggcgaaacccgacaggacttaaagatccccaccgtttccggcgggtcgctccctcttgcgctctcctgttccgaccctgccgtttaccggatacctgttccgcctttctcccttacgggaagtgtggcgctttctcatagctcacacactggtatctcggctcggtgtaggtcgttcgctccaagctgggctgtaagcaagaactccccgttcagcccgactgctgcgccttatccggtaactgttcacttgagtccaacccggaaaagcacggtaaaacgccactggcagcagccattggtaactgggagttcgcagaggatttgtttagctaaacacgcggttgctcttgaagtgtgcgccaaagtccggctacactggaaggacagatttggttgctgtgctctgcgaaagccagttaccacggttaagcagttccccaactgacttaaccttcgatcaaaccacctccccaggtggttttttcgtttacagggcaaaagattacgcgcagaaaaaaaggatctcaagaagatcctttgatc

SEQ ID NO: 5 - DNA, 11912 bp, synthetic construct
  source 1..11912: mol_type = other DNA
ttttctactgaaccgctctagatttcagtgcaatttatctcttcaaatgtagcacctgaagtcagccccatacgatataagttgtaattctcatgttagtcatgccccgcgcccaccggaaggagctgactgggttgaaggctctcaagggcatcggtcgcacgcttgtgttgacagctagctcagtcctaggtataatactagtcacgtgaactgccgagtaggtagctgataacttagcggaatgctggtacgggctgataaagaagtgaactgccgagtaggtagctgataactcgagagatccggctgctaacaaacccgcttaaggaagatggccaacttatttacataaggctgctgccaccgctgagcaataactagcataaccccttggggcctctaaacgggtcttgaggggttttttggtttaaacccatctaattgggaattccccctgcctcgcgcgtttcggtgatgacggtgaaaacctctgacacagcgatcgcttatgacaacttgacggctacatcattcactttttcttcacaaccggcacggaactcgctcgggctggccccggtgcattttttaaatacccgcgagaaatagagttgatcgtcaaaaccaacattgcgaccgacggtggcgataggcatccgggtggtgctcaaaagcagcttcgcctggctgatacgttggtcctcgcgccagcttaagacgctaatccctaactgctggcggaaaagatgtgacagacgcgacggcgacaagcaaacatgctgtgcgacgctggcgatatcaaaattgctgtctgccaggtgatcgctgatgtactgacaagcctcgcgtacccgattatccatcggtggatggagcgactcgttaatcgcttccatgcgccgcagtaacaattgctcaagcagatttatcgccagcagctccgaatagcgcccttccccttgcccggcgttaatgatttgcccaaacaggtcgctgaaatgcggctggtgcgcttcatccgggcgaaagaaccccgtattggcaaatattgacggccagttaagccattcatgccagtaggcgcgcggacgaaagtaaacccactggtgataccattcgcgagcctccggatgacgaccgtagtgatgaatctctcctggcgggaacagcaaaatatcacccggtcggcaaacaaattctcgtccctgatttttcaccaccccctgaccgcgaatggtgagattgagaatataacctttcattcccagcggtcggtcgataaaaaaatcgagataaccgttggcctcaatcggcgttaaacccgccaccagatgggcattaaacgagtatcccggcagcaggggatcattttgcgcttcagccatacttttcatactcccgccattcagagaagaaaccaattgtccatattgcatcagacattgccgtcactgcgtcttttactggctcttctcgctaaccaaaccggtaaccccgcttattaaaagcattctgtaacaaagcgggaccaaagccatgacaaaaacgcgtaacaaaagtgtctataatcacggcagaaaagtccacattgattatttgcacggcgtcacactttgctatgccatagcatttttatccataagattagcggatcctacctgacgctttttatcgcaactctctactgtttctccatacccgggatccgaattcgagcgaaggagatatacatatgtttttgcaaagacctaaaccttacagcgatgaaagtttagaaagtttctttatccgagtggctaacaaaaatggctacggtgatgtccatcgcttcctagaagccactaaacgattccttcaagacattgaccataatggctatcaaacctttccgactgatataactcggataaacccatactcagctaaaaacagttccagcgcacgaactgcgtcattcctgaaacttgcacaattgacatttaatgaaccgccagagctacttgggttggcaattaacagaacaaacatgaaatactcgccgtcaactagcgcggttgttagaggtgcagaagtctttcctcgcagtttactacggacgcactccatcccctgctgtcctttgtgtctgcgagaaaatggctacgcctcctacctttggcactttcaggggtacgaatactgccacagccataacgtacctttaattaccacttgtagctgtggtaaggagtttgactaccgagtatctgggttaaagggcatttgctgcaaatgcaaggagcctatcaccttaaccagcagggagaacggtcatgaggcagcgtgtactgtttcaaactggcttgctggccatgaatctaaacctctgccaaatcttcctaaaagctaccgatggggtttagttcattggtggatgggtattaaagatagcgagttcgatcacttttcgttcgttcaatttttctcaaactggccaaggtcattccactcgataatcgaagatgaagtagagttcaaccttgagcatgctgttgtcagcacgtctgaattacgactaaaagatcttcttggtcgattgtttttcggttcaattcggttacctgagcggaatcttcaacacaatatcatccttggtgagcttctctgctatttagaaaatcgtttatggcaagacaagggattaatcgccaacctcaaaatgaacgcgttagaggcgactgtaatgttaaattgtagcctcgatcagattgcatcaatggttgaacaacgcatcttgaagccaaatcgaaaaagcaagcccaacagccctcttgatgttaccgattatctatttcatttcggcgatattttctgtctttggttagctgagttccaaagcgatgagtttaaccgttcgttttatgtgtcgaggtggtaaatgcaaactctgaaagaactaatcgcatccaatcctgacgacttaacaactgaacttaagagagcatttcgtccactcacaccgcatattgcaattgatggtaatgaacttgacgcactgacgatattagtcaatttaaccgataagactgatgatcagaaagacctgctcgatcgagccaaatgcaagcaaaaacttcgagatgaaaaatggtgggctagctgcataaattgcgttaattacagacaaagccataacccaaaattcccggatatacgttctgaaggcgtgattcgaacccaagccctgggtgaattaccgagtttcctactctcgtcctcaaaaatcccaccataccattggtcatatagccatgattcaaaatacgtcaacaaaagcgcattcctcaccaatgagttttgttgggatggtgagatctcatgtttgggtgagcttcttaaagatgcagatcacccactttggaatactttgaaaaagttaggttgttctcaaaaaacttgcaaagcaatggcaaaacaactagctgatattactctcacgactatcaatgtcacactcgcaccaaattacctgactcaaatatctctccccgatagtgatacatcctacatttcactctctcctgttgcatcgctatcgatgcaaagccactttcatcagaggctccaagatgaaaatcggcatagcgcgataacgcggtttagccgaactaccaacatgggggtcactgcgatgacatgtggcggcgcatttagaatgttaaagtctggcgctaagttttccagcccccctcatcaccgattaaacagtaaacgaagttggttgacgtcagagcatgttcagtcattaaaacagtaccagcgcctcaacaaaagcctcatacctgaaaactctcggattgcactccgtagaaaatacaaaatcgagcttcaaaatatggtcagatcttggtttgcaatgcaagaccatacccttgattcgaacatacttatccaacatttgaatcatgacctatcttacttaggagccacaaaacgttttgcatacgatccagcgatgaccaagctctttactgagcttttgaaacgagagttatcaaattcaatcaataatggtgagcaacacactaatggatcgtttttagtcctaccgaatatcagggtttgtggcgcaacagctttaagctccccggtaacggtggggattccatcacttacagctttctttggcttcgttcacgcatttgaacggaatataaatcgcaccacctcatcgtttcgtgttgaatcctttgcgatatgcgtccatcaactacatgtcgagaagcgaggtttgacagcagagtttgtggaaaaaggcgacgggactatatccgctcccgcgacccgggatgactggcagtgtgatgtcgtatttagccttattttgaacaccaactttgctcaacatattgaccaagatacgttagttacatcactaccaaagcgattggctcggggttcagcaaaaattgcgattgatgactttaaacatatcaactcattctcgacattagaaacagcgatcgaatctctgccaatagaagctggtaggtggttatcactttacgcacagtcaaacaataatctaagtgatctattagcagccatgacagaggaccatcagctcatggcaagctgcgtcggttaccacttgttagaagagcccaaagataaaccaaactccctcagaggttacaaacacgctatcgccgagtgcatcattggactcattaactcaatcacctttagctcagagactgatcccaacacaatcttttggtcgctaaagaactatcaaaactacctagtggtacagccaaggagtatcaacgatgaaactaccgacaaatctagcctatgagcgctctatcgacccatcagatgtctgtttttttgtcgtctggcccgatgatagaaaaacacctttaacctacaattctcgtactctgctcgggcaaatggaagcggcatcattagcctatgatgtctcaggtcaaccaataaaaagtgccaccgctgaggcgttagctcaagggaaccctcatcaagttgatttctgccacgttccatacggtgcgagtcatattgaatgcagtttctccgtctcgttttcttctgaactacgtcaaccatataagtgtaactcaagcaaagttaaacaaacgctagtgcaattagtcgagctctacgaaacgaaaatcggctggactgagctagcaacccgatatttgatgaacatttgcaacggtaaatggctgtggaaaaatacccgtaaagcctattgctggaacattgtacttacaccttggccttggaacggggaaaaggttggatttgaagatattcgtactaactacacctcacggcaagactttaaaaataataaaaattggtctgctatagttgaaatgatcaaaaccgcattttctagtactgatgggctggcgatatttgaagtcagggccaccttgcacttgccaacgaatgctatggtgcggccaagccaagttttcacagaaaaagaaagtggcagtaaaagtaaatctaaaactcaaaacagtcgagtttttcagagtacaactattgatggtgaacgatcgccaatactaggggcctttaaaacgggagcagctattgcaaccattgacgactggtatcctgaagccactgagccactaagggtcggacggtttggggttcatcgcgaagatgtcacttgctaccgtcatccgtctaccggaaaagattttttctcgatattacaacaagcagagcactatattgaagtgttgagcgccaacaaaactcccgctcaagaaactatcaacgacatgcactttttaatggctaacctgattaagggtgggatgttccagcataaaggagactgactgtgaaatggtattataagacaatcacctttctgccagagttgtgcaacaacgagtcactggctgcaaagtgtctccgcgttctgcatggatttaactatcagtatgagacacgaaatatcggcgtttcatttccgctttggtgtgatgcaacggttggaaaaaagatttcatttgtcagcaagaacaagatagaactcgacttactacttaaacaacactatttcgtccaaatggaacaacttcaatactttcatatatccaacactgttctcgtcccagaagattgtacatacgtttcctttagacgctgtcaatctatagataagctcacagcagcagggctggcaaggaaaatcagacgcctggagaaacgtgctctatctagaggcgagcaatttgacccatcatcttttgctcaaaaagagcatactgcaatagcgcactaccactcacttggggagtccagcaaacagacgaaccgcaactttcgactcaatatcaggatgctctcggagcaaccccgtgaggggaactcgatttttagtagctatggcttatcaaattcagaaaactcgtttcagcctgtacccttaatctgacctttaataaggagatataccatggcgacaagtttacctacgccctcagcaattacgacttcggcgttagagtatgcattccatactcccgctcgcaatctaacgaaatctcgcggaaaaaacattcatcgttatgtcagtgtaaagatgagtaagaggattacggtagaatctactctagagtgtgatgcctgctatcactttgattttgagccaagtattgttcgcttttgcgctcaaccgattcgatttttatattatctcaatggtcagtctcactcctatgttcctgactttctagttcaatttgataccaacgagtttgttctatatgaagtaaagtcagcttatgctaagaacaaacctgattttgatgttgaatgggaggcgaaagtaaaagcagcaactgaactagggctagaattggagcttgttgaagagagtgatattagggatacggttgtattaaataatcttaagcgcatgcatcgttatgcttcgaaagatgagctgaataacgtacataactctctcttaaaaataataaagtacaatggcgcccaatctgcaagatgcttgggagaacagttgggtttaaaaggccgaactgttttaccaattttgtgcgatttgctgtcaaggtgtttactcgatacacgtttggataagcctctatctcttgaatctcgatttgagttggccagttatggctaagaaagggttctcaagtttccatagaaaagcagtctcttcccaagatacgcttgaatcgatagagcttgtctctagcgctaattgtctagaaagtgttacgtatcaagatatatcagcatttcccgaaacaattgcggtagagattaatttccgattaagcattcttcgctttttagcgcgaaagtgcgaaaccattgtggccaaatcaattgaaccacatcgtgtagagctacagcaaaactatagtagaaaaatacccagtgcaataacgatatatcgatggtggcttgcttttcgaaaatcagactacaaccccattagcttagcacctaatatcaaggatagaggtaatagagagacaaaagtgtcaacagttgttgattctattatggaacaggcagttgaaagagttatatctggacgaaaagtcaatgttagctctgcatataaacgtgttcgacgaaaagttcgtcaatacaatctaactcatggaacgaaatacacgtatcctaagtacgaatctgtaagaaagcgagtaaaaaagaaaaccccatttgagttattagccgcagggaaaggggagagagtagctaagagagagtttcgccgaatgggaaaaaagatcctcacgtctagcgtgctagagagggttgaaatagatcacactgtcgttgacctttttgcagtacacgaagagtatcgaatcccattgggccgaccttggcttactcaattggttgattgttacagtaaagctgtaatcggtttttatttaggtttcgagcctcctagctatgtgtcggtttcccttgcacttaagaatgcaatacaacgcaaagatgacttaatctcctcgtatgaatcgatcgagaatgaatggctatgttatggcatcccagacctactcgtaactgataatggtaaagagtttttgtcgaaagcatttgatcaagcatgtgaatcactattgatcaatgtgcatcaaaataaagttgagacgcccgacaacaaacctcatgttgaacgtaactacgggactattaatacttctctgttagacgatttacctgggaaatccttcagccagtaccttcaaagagaagggtacgactctgtgggagaagctacccttacactcaatgagattagagaaatttacttaatttggttggtggatatttatcataaaaaacccaatcagagaggcactaattgtcctaatgttgcgtggaaaaagggttgtcaagaatgggaaccagaggagttctctggttctaaagacgaattagactttaaatttgctattgttgattacaaacaacttactaaagtagggataactgtctacaaagaactgagttatagcaatgaccgtttagctgaatatagagggaagaaaggaaaccataaagttcagttcaagtataaccctgagtgtatggcagttatttgggtgttggatgaggatatgaatgagtactttacagttaatgcgattgactacgaatatgcaagtagagtatcactttggcaacataaatataacatgaaatatcaagcagaactaaattcagcagaatatgatgaggacaaggaaattgatgcagaaataaaaattgaagaaatcgcagatcgttcaattgttaagactaacaaaatcagagctcggaggcgtggcgctaggcatcaagagaatagcgcaagggctaagtcaatcagtaatgcgaacccggcctcgatacaaaaacatgaagatgaaatcgttagtgcagataatgacgattgggatattgattatgtctgagaaatcgtcaaatgagtgaaacgcgtgaggctcgtatatcaagagctaaaagggcatttgtatccacaccgagcgttaggaaaatcttgagttacatggatagatgtagagatctatcagacctagagtctgagcctacatgcatgatggtctatggtgcttcgggtgtaggtaaaacgaccgtcatcaagaaatacttaaatcaaaacagaagagagtccgaagccgggggcgatataataccggttttgcatattgagttgccagacaatgcgaagccagtagatgcagcaagggaattgctggttgaaatgggtgacccgctagcactttatgaaactgacttagctagattgacgaaaagactgactgaattaatccctgcggtcggcgtgaagctgattattatcgatgagttccaacatttggtggaagaaaggtcaaatcgggttcttacccaagtaggtaattggctaaaaatgatacttaacaaaacgaaatgtccaattgttatatttggtatgccatactcaaaagttgtactgcaagcaaactcgcaacttcacgggcgattttccattcaggttgaactgcgcccctttagctaccagggaggtagaggtgtatttaaaacttttttggaataccttgataaagccctaccttttgaaaaacaggctggcttagccaacgaaagtttgcagaaaaaattgtatgcattctctcagggaaacatgcgttcgttgagaaaccttatttatcaagcatctatcgaagcaattgataatcagcatgagacgataaccgaagaagatttcgtttttgcatcgaagttgacatcgggcgataaacccaactcatggaaaaatccttttgaggagggtgttgaggtaacagaagatatgttacgaccgccaccaaaagatattggttgggaggactatttgagacattcaaccccgagagtgagtaaaccaggtagaaataaaaactttttcgaataacctaggctgctgcgctgctgccaccgctgagcaataactagcataaccccttggggcctctaaacgggtcttgaggggttttttgctgaaacctcaggcattgaacctgcacggtaccgagctcgaattcactggccgtcgttttacaacgtcgtgactgggaaaaccctggcgttacccaacttaatcgccttgctatcgtggccggatcttgcggcccctcggcttgaacgaattgttagacattatttgccgactaccttggtgatctcgcctttcacgtagtggacaaattcttccaactgatctgcgcgcgaggccaagcgatcttcttcttgtccaagataagcctgtctagcttcaagtatgacgggctgatactgggccggcaggcgctccattgcccagtcggcagcgacatccttcggcgcgattttgccggttactgcgctgtaccaaatgcgggacaacgtaagcactacatttcgctcatcgccagcccagtcgggcggcgagttccatagcgttaaggtttcatttagcgcctcaaatagatcctgttcaggaaccggatcaaagagttcctccgccgctggacctaccaaggcaacgctatgttctcttgcttttgtcagcaagatagccagatcaatgtcgatcgtggctggctcgaagatacctgcaagaatgtcattgcgctgccattctccaaattgcagttcgcgcttagctggataacgccacggaatgatgtcgtcgtgcacaacaatggtgacttctacagcgcggagaatctcgctctctccaggggaagccgaagtttccaaaaggtcgttgatcaaagctcgccgcgttgtttcatcaagccttacggtcaccgtaaccagcaaatcaatatcactgtgtggcttcaggccgccatccactgcggagccgtacaaatgtacggccagcaacgtcggttcgagatggcgctcgatgacgccaactacctctgatagttgagtcgatacttcggcgatcaccgcttccctcatactcttcctttttcaatattattgaagcatttatcagggttattgtctcatgagcggatacatatttgaatgtatttagaaaaataaacaaatagctagctcactcggtcgctacgctccgggcgtgagactgcggcgggcgctgcggacacatacaaagttacccacagattccgtggataagcaggggactaacatgtgaggcaaaacagcagggccgcgccggtggcgtttttccataggctccgccctcctgccagagttcacataaacagacgcttttccggtgcatctgtgggagccgtgaggctcaaccatgaatctgacagtacgggcgaaacccgacaggacttaaagatccccaccgtttccggcgggtcgctccctcttgcgctctcctgttccgaccctgccgtttaccggatacctgttccgcctttctcccttacgggaagtgtggcgctttctcatagctcacacactggtatctcggctcggtgtaggtcgttcgctccaagctgggctgtaagcaagaactccccgttcagcccgactgctgcgccttatccggtaactgttcacttgagtccaacccggaaaagcacggtaaaacgccactggcagcagccattggtaactgggagttcgcagaggatttgtttagctaaacacgcggttgctcttgaagtgtgcgccaaagtccggctacactggaaggacagatttggttgctgtgctctgcgaaagccagttaccacggttaagcagttccccaactgacttaaccttcgatcaaaccacctccccaggtggttttttcgtttacagggcaaaagattacgcgcagaaaaaaaggatctcaagaagatcctttgatc

SEQ ID NO: 6 - DNA, 11912 bp, synthetic construct
  source 1..11912: mol_type = other DNA
ttttctactgaaccgctctagatttcagtgcaatttatctcttcaaatgtagcacctgaagtcagccccatacgatataagttgtaattctcatgttagtcatgccccgcgcccaccggaaggagctgactgggttgaaggctctcaagggcatcggtcgcacgcttgtgttgacagctagctcagtcctaggtataatactagtcacgtgaactgccgagtaggtagctgataacagctgcaacaatgttgaaaatgccagccaactgtgaactgccgagtaggtagctgataactcgagagatccggctgctaacaaacccgcttaaggaagatggccaacttatttacataaggctgctgccaccgctgagcaataactagcataaccccttggggcctctaaacgggtcttgaggggttttttggtttaaacccatctaattgggaattccccctgcctcgcgcgtttcggtgatgacggtgaaaacctctgacacagcgatcgcttatgacaacttgacggctacatcattcactttttcttcacaaccggcacggaactcgctcgggctggccccggtgcattttttaaatacccgcgagaaatagagttgatcgtcaaaaccaacattgcgaccgacggtggcgataggcatccgggtggtgctcaaaagcagcttcgcctggctgatacgttggtcctcgcgccagcttaagacgctaatccctaactgctggcggaaaagatgtgacagacgcgacggcgacaagcaaacatgctgtgcgacgctggcgatatcaaaattgctgtctgccaggtgatcgctgatgtactgacaagcctcgcgtacccgattatccatcggtggatggagcgactcgttaatcgcttccatgcgccgcagtaacaattgctcaagcagatttatcgccagcagctccgaatagcgcccttccccttgcccggcgttaatgatttgcccaaacaggtcgctgaaatgcggctggtgcgcttcatccgggcgaaagaaccccgtattggcaaatattgacggccagttaagccattcatgccagtaggcgcgcggacgaaagtaaacccactggtgataccattcgcgagcctccggatgacgaccgtagtgatgaatctctcctggcgggaacagcaaaatatcacccggtcggcaaacaaattctcgtccctgatttttcaccaccccctgaccgcgaatggtgagattgagaatataacctttcattcccagcggtcggtcgataaaaaaatcgagataaccgttggcctcaatcggcgttaaacccgccaccagatgggcattaaacgagtatcccggcagcaggggatcattttgcgcttcagccatacttttcatactcccgccattcagagaagaaaccaattgtccatattgcatcagacattgccgtcactgcgtcttttactggctcttctcgctaaccaaaccggtaaccccgcttattaaaagcattctgtaacaaagcgggaccaaagccatgacaaaaacgcgtaacaaaagtgtctataatcacggcagaaaagtccacattgattatttgcacggcgtcacactttgctatgccatagcatttttatccataagattagcggatcctacctgacgctttttatcgcaactctctactgtttctccatacccgggatccgaattcgagcgaaggagatatacatatgtttttgcaaagacctaaaccttacagcgatgaaagtttagaaagtttctttatccgagtggctaacaaaaatggctacggtgatgtccatcgcttcctagaagccactaaacgattccttcaagacattgaccataatggctatcaaacctttccgactgatataactcggataaacccatactcagctaaaaacagttccagcgcacgaactgcgtcattcctgaaacttgcacaattgacatttaatgaaccgccagagctacttgggttggcaattaacagaacaaacatgaaatactcgccgtcaactagcgcggttgttagaggtgcagaagtctttcctcgcagtttactacggacgcactccatcccctgctgtcctttgtgtctgcgagaaaatggctacgcctcctacctttggcactttcaggggtacgaatactgccacagccataacgtacctttaattaccacttgtagctgtggtaaggagtttgactaccgagtatctgggttaaagggcatttgctgcaaatgcaaggagcctatcaccttaaccagcagggagaacggtcatgaggcagcgtgtactgtttcaaactggcttgctggccatgaatctaaacctctgccaaatcttcctaaaagctaccgatggggtttagttcattggtggatgggtattaaagatagcgagttcgatcacttttcgttcgttcaatttttctcaaactggccaaggtcattccactcgataatcgaagatgaagtagagttcaaccttgagcatgctgttgtcagcacgtctgaattacgactaaaagatcttcttggtcgattgtttttcggttcaattcggttacctgagcggaatcttcaacacaatatcatccttggtgagcttctctgctatttagaaaatcgtttatggcaagacaagggattaatcgccaacctcaaaatgaacgcgttagaggcgactgtaatgttaaattgtagcctcgatcagattgcatcaatggttgaacaacgcatcttgaagccaaatcgaaaaagcaagcccaacagccctcttgatgttaccgattatctatttcatttcggcgatattttctgtctttggttagctgagttccaaagcgatgagtttaaccgttcgttttatgtgtcgaggtggtaaatgcaaactctgaaagaactaatcgcatccaatcctgacgacttaacaactgaacttaagagagcatttcgtccactcacaccgcatattgcaattgatggtaatgaacttgacgcactgacgatattagtcaatttaaccgataagactgatgatcagaaagacctgctcgatcgagccaaatgcaagcaaaaacttcgagatgaaaaatggtgggctagctgcataaattgcgttaattacagacaaagccataacccaaaattcccggatatacgttctgaaggcgtgattcgaacccaagccctgggtgaattaccgagtttcctactctcgtcctcaaaaatcccaccataccattggtcatatagccatgattcaaaatacgtcaacaaaagcgcattcctcaccaatgagttttgttgggatggtgagatctcatgtttgggtgagcttcttaaagatgcagatcacccactttggaatactttgaaaaagttaggttgttctcaaaaaacttgcaaagcaatggcaaaacaactagctgatattactctcacgactatcaatgtcacactcgcaccaaattacctgactcaaatatctctccccgatagtgatacatcctacatttcactctctcctgttgcatcgctatcgatgcaaagccactttcatcagaggctccaagatgaaaatcggcatagcgcgataacgcggtttagccgaactaccaacatgggggtcactgcgatgacatgtggcggcgcatttagaatgttaaagtctggcgctaagttttccagcccccctcatcaccgattaaacagtaaacgaagttggttgacgtcagagcatgttcagtcattaaaacagtaccagcgcctcaacaaaagcctcatacctgaaaactctcggattgcactccgtagaaaatacaaaatcgagcttcaaaatatggtcagatcttggtttgcaatgcaagaccatacccttgattcgaacatacttatccaacatttgaatcatgacctatcttacttaggagccacaaaacgttttgcatacgatccagcgatgaccaagctctttactgagcttttgaaacgagagttatcaaattcaatcaataatggtgagcaacacactaatggatcgtttttagtcctaccgaatatcagggtttgtggcgcaacagctttaagctccccggtaacggtggggattccatcacttacagctttctttggcttcgttcacgcatttgaacggaatataaatcgcaccacctcatcgtttcgtgttgaatcctttgcgatatgcgtccatcaactacatgtcgagaagcgaggtttgacagcagagtttgtggaaaaaggcgacgggactatatccgctcccgcgacccgggatgactggcagtgtgatgtcgtatttagccttattttgaacaccaactttgctcaacatattgaccaagatacgttagttacatcactaccaaagcgattggctcggggttcagcaaaaattgcgattgatgactttaaacatatcaactcattctcgacattagaaacagcgatcgaatctctgccaatagaagctggtaggtggttatcactttacgcacagtcaaacaataatctaagtgatctattagcagccatgacagaggaccatcagctcatggcaagctgcgtcggttaccacttgttagaagagcccaaagataaaccaaactccctcagaggttacaaacacgctatcgccgagtgcatcattggactcattaactcaatcacctttagctcagagactgatcccaacacaatcttttggtcgctaaagaactatcaaaactacctagtggtacagccaaggagtatcaacgatgaaactaccgacaaatctagcctatgagcgctctatcgacccatcagatgtctgtttttttgtcgtctggcccgatgatagaaaaacacctttaacctacaattctcgtactctgctcgggcaaatggaagcggcatcattagcctatgatgtctcaggtcaaccaataaaaagtgccaccgctgaggcgttagctcaagggaaccctcatcaagttgatttctgccacgttccatacggtgcgagtcatattgaatgcagtttctccgtctcgttttcttctgaactacgtcaaccatataagtgtaactcaagcaaagttaaacaaacgctagtgcaattagtcgagctctacgaaacgaaaatcggctggactgagctagcaacccgatatttgatgaacatttgcaacggtaaatggctgtggaaaaatacccgtaaagcctattgctggaacattgtacttacaccttggccttggaacggggaaaaggttggatttgaagatattcgtactaactacacctcacggcaagactttaaaaataataaaaattggtctgctatagttgaaatgatcaaaaccgcattttctagtactgatgggctggcgatatttgaagtcagggccaccttgcacttgccaacgaatgctatggtgcggccaagccaagttttcacagaaaaagaaagtggcagtaaaagtaaatctaaaactcaaaacagtcgagtttttcagagtacaactattgatggtgaacgatcgccaatactaggggcctttaaaacgggagcagctattgcaaccattgacgactggtatcctgaagccactgagccactaagggtcggacggtttggggttcatcgcgaagatgtcacttgctaccgtcatccgtctaccggaaaagattttttctcgatattacaacaagcagagcactatattgaagtgttgagcgccaacaaaactcccgctcaagaaactatcaacgacatgcactttttaatggctaacctgattaagggtgggatgttccagcataaaggagactgactgtgaaatggtattataagacaatcacctttctgccagagttgtgcaacaacgagtcactggctgcaaagtgtctccgcgttctgcatggatttaactatcagtatgagacacgaaatatcggcgtttcatttccgctttggtgtgatgcaacggttggaaaaaagatttcatttgtcagcaagaacaagatagaactcgacttactacttaaacaacactatttcgtccaaatggaacaacttcaatactttcatatatccaacactgttctcgtcccagaagattgtacatacgtttcctttagacgctgtcaatctatagataagctcacagcagcagggctggcaaggaaaatcagacgcctggagaaacgtgctctatctagaggcgagcaatttgacccatcatcttttgctcaaaaagagcatactgcaatagcgcactaccactcacttggggagtccagcaaacagacgaaccgcaactttcgactcaatatcaggatgctctcggagcaaccccgtgaggggaactcgatttttagtagctatggcttatcaaattcagaaaactcgtttcagcctgtacccttaatctgacctttaataaggagatataccatggcgacaagtttacctacgccctcagcaattacgacttcggcgttagagtatgcattccatactcccgctcgcaatctaacgaaatctcgcggaaaaaacattcatcgttatgtcagtgtaaagatgagtaagaggattacggtagaatctactctagagtgtgatgcctgctatcactttgattttgagccaagtattgttcgcttttgcgctcaaccgattcgatttttatattatctcaatggtcagtctcactcctatgttcctgactttctagttcaatttgataccaacgagtttgttctatatgaagtaaagtcagcttatgctaagaacaaacctgattttgatgttgaatgggaggcgaaagtaaaagcagcaactgaactagggctagaattggagcttgttgaagagagtgatattagggatacggttgtattaaataatcttaagcgcatgcatcgttatgcttcgaaagatgagctgaataacgtacataactctctcttaaaaataataaagtacaatggcgcccaatctgcaagatgcttgggagaacagttgggtttaaaaggccgaactgttttaccaattttgtgcgatttgctgtcaaggtgtttactcgatacacgtttggataagcctctatctcttgaatctcgatttgagttggccagttatggctaagaaagggttctcaagtttccatagaaaagcagtctcttcccaagatacgcttgaatcgatagagcttgtctctagcgctaattgtctagaaagtgttacgtatcaagatatatcagcatttcccgaaacaattgcggtagagattaatttccgattaagcattcttcgctttttagcgcgaaagtgcgaaaccattgtggccaaatcaattgaaccacatcgtgtagagctacagcaaaactatagtagaaaaatacccagtgcaataacgatatatcgatggtggcttgcttttcgaaaatcagactacaaccccattagcttagcacctaatatcaaggatagaggtaatagagagacaaaagtgtcaacagttgttgattctattatggaacaggcagttgaaagagttatatctggacgaaaagtcaatgttagctctgcatataaacgtgttcgacgaaaagttcgtcaatacaatctaactcatggaacgaaatacacgtatcctaagtacgaatctgtaagaaagcgagtaaaaaagaaaaccccatttgagttattagccgcagggaaaggggagagagtagctaagagagagtttcgccgaatgggaaaaaagatcctcacgtctagcgtgctagagagggttgaaatagatcacactgtcgttgacctttttgcagtacacgaagagtatcgaatcccattgggccgaccttggcttactcaattggttgattgttacagtaaagctgtaatcggtttttatttaggtttcgagcctcctagctatgtgtcggtttcccttgcacttaagaatgcaatacaacgcaaagatgacttaatctcctcgtatgaatcgatcgagaatgaatggctatgttatggcatcccagacctactcgtaactgataatggtaaagagtttttgtcgaaagcatttgatcaagcatgtgaatcactattgatcaatgtgcatcaaaataaagttgagacgcccgacaacaaacctcatgttgaacgtaactacgggactattaatacttctctgttagacgatttacctgggaaatccttcagccagtaccttcaaagagaagggtacgactctgtgggagaagctacccttacactcaatgagattagagaaatttacttaatttggttggtggatatttatcataaaaaacccaatcagagaggcactaattgtcctaatgttgcgtggaaaaagggttgtcaagaatgggaaccagaggagttctctggttctaaagacgaattagactttaaatttgctattgttgattacaaacaacttactaaagtagggataactgtctacaaagaactgagttatagcaatgaccgtttagctgaatatagagggaagaaaggaaaccataaagttcagttcaagtataaccctgagtgtatggcagttatttgggtgttggatgaggatatgaatgagtactttacagttaatgcgattgactacgaatatgcaagtagagtatcactttggcaacataaatataacatgaaatatcaagcagaactaaattcagcagaatatgatgaggacaaggaaattgatgcagaaataaaaattgaagaaatcgcagatcgttcaattgttaagactaacaaaatcagagctcggaggcgtggcgctaggcatcaagagaatagcgcaagggctaagtcaatcagtaatgcgaacccggcctcgatacaaaaacatgaagatgaaatcgttagtgcagataatgacgattgggatattgattatgtctgagaaatcgtcaaatgagtgaaacgcgtgaggctcgtatatcaagagctaaaagggcatttgtatccacaccgagcgttaggaaaatcttgagttacatggatagatgtagagatctatcagacctagagtctgagcctacatgcatgatggtctatggtgcttcgggtgtaggtaaaacgaccgtcatcaagaaatacttaaatcaaaacagaagagagtccgaagccgggggcgatataataccggttttgcatattgagttgccagacaatgcgaagccagtagatgcagcaagggaattgctggttgaaatgggtgacccgctagcactttatgaaactgacttagctagattgacgaaaagactgactgaattaatccctgcggtcggcgtgaagctgattattatcgatgagttccaacatttggtggaagaaaggtcaaatcgggttcttacccaagtaggtaattggctaaaaatgatacttaacaaaacgaaatgtccaattgttatatttggtatgccatactcaaaagttgtactgcaagcaaactcgcaacttcacgggcgattttccattcaggttgaactgcgcccctttagctaccagggaggtagaggtgtatttaaaacttttttggaataccttgataaagccctaccttttgaaaaacaggctggcttagccaacgaaagtttgcagaaaaaattgtatgcattctctcagggaaacatgcgttcgttgagaaaccttatttatcaagcatctatcgaagcaattgataatcagcatgagacgataaccgaagaagatttcgtttttgcatcgaagttgacatcgggcgataaacccaactcatggaaaaatccttttgaggagggtgttgaggtaacagaagatatgttacgaccgccaccaaaagatattggttgggaggactatttgagacattcaaccccgagagtgagtaaaccaggtagaaataaaaactttttcgaataacctaggctgctgcgctgctgccaccgctgagcaataactagcataaccccttggggcctctaaacgggtcttgaggggttttttgctgaaacctcaggcattgaacctgcacggtaccgagctcgaattcactggccgtcgttttacaacgtcgtgactgggaaaaccctggcgttacccaacttaatcgccttgctatcgtggccggatcttgcggcccctcggcttgaacgaattgttagacattatttgccgactaccttggtgatctcgcctttcacgtagtggacaaattcttccaactgatctgcgcgcgaggccaagcgatcttcttcttgtccaagataagcctgtctagcttcaagtatgacgggctgatactgggccggcaggcgctccattgcccagtcggcagcgacatccttcggcgcgattttgccggttactgcgctgtaccaaatgcgggacaacgtaagcactacatttcgctcatcgccagcccagtcgggcggcgagttccatagcgttaaggtttcatttagcgcctcaaatagatcctgttcaggaaccggatcaaagagttcctccgccgctggacctaccaaggcaacgctatgttctcttgcttttgtcagcaagatagccagatcaatgtcgatcgtggctggctcgaagatacctgcaagaatgtcattgcgctgccattctccaaattgcagttcgcgcttagctggataacgccacggaatgatgtcgtcgtgcacaacaatggtgacttctacagcgcggagaatctcgctctctccaggggaagccgaagtttccaaaaggtcgttgatcaaagctcgccgcgttgtttcatcaagccttacggtcaccgtaaccagcaaatcaatatcactgtgtggcttcaggccgccatccactgcggagccgtacaaatgtacggccagcaacgtcggttcgagatggcgctcgatgacgccaactacctctgatagttgagtcgatacttcggcgatcaccgcttccctcatactcttcctttttcaatattattgaagcatttatcagggttattgtctcatgagcggatacatatttgaatgtatttagaaaaataaacaaatagctagctcactcggtcgctacgctccgggcgtgagactgcggcgggcgctgcggacacatacaaagttacccacagattccgtggataagcaggggactaacatgtgaggcaaaacagcagggccgcgccggtggcgtttttccataggctccgccctcctgccagagttcacataaacagacgcttttccggtgcatctgtgggagccgtgaggctcaaccatgaatctgacagtacgggcgaaacccgacaggacttaaagatccccaccgtttccggcgggtcgctccctcttgcgctctcctgttccgaccctgccgtttaccggatacctgttccgcctttctcccttacgggaagtgtggcgctttctcatagctcacacactggtatctcggctcggtgtaggtcgttcgctccaagctgggctgtaagcaagaactccccgttcagcccgactgctgcgccttatccggtaactgttcacttgagtccaacccggaaaagcacggtaaaacgccactggcagcagccattggtaactgggagttcgcagaggatttgtttagctaaacacgcggttgctcttgaagtgtgcgccaaagtccggctacactggaaggacagatttggttgctgtgctctgcgaaagccagttaccacggttaagcagttccccaactgacttaaccttcgatcaaaccacctccccaggtggttttttcgtttacagggcaaaagattacgcgcagaaaaaaaggatctcaagaagatcctttgatc

SEQ ID NO: 7 - DNA, 11912 bp, synthetic construct
  source 1..11912: mol_type = other DNA
gagatccggctgctaacaaacccgcttaaggaagatggccaacttatttacataaggctgctgccaccgctgagcaataactagcataaccccttggggcctctaaacgggtcttgaggggttttttggtttaaacccatctaattgggaattccccctgcctcgcgcgtttcggtgatgacggtgaaaacctctgacacagcgatcgcttatgacaacttgacggctacatcattcactttttcttcacaaccggcacggaactcgctcgggctggccccggtgcattttttaaatacccgcgagaaatagagttgatcgtcaaaaccaacattgcgaccgacggtggcgataggcatccgggtggtgctcaaaagcagcttcgcctggctgatacgttggtcctcgcgccagcttaagacgctaatccctaactgctggcggaaaagatgtgacagacgcgacggcgacaagcaaacatgctgtgcgacgctggcgatatcaaaattgctgtctgccaggtgatcgctgatgtactgacaagcctcgcgtacccgattatccatcggtggatggagcgactcgttaatcgcttccatgcgccgcagtaacaattgctcaagcagatttatcgccagcagctccgaatagcgcccttccccttgcccggcgttaatgatttgcccaaacaggtcgctgaaatgcggctggtgcgcttcatccgggcgaaagaaccccgtattggcaaatattgacggccagttaagccattcatgccagtaggcgcgcggacgaaagtaaacccactggtgataccattcgcgagcctccggatgacgaccgtagtgatgaatctctcctggcgggaacagcaaaatatcacccggtcggcaaacaaattctcgtccctgatttttcaccaccccctgaccgcgaatggtgagattgagaatataacctttcattcccagcggtcggtcgataaaaaaatcgagataaccgttggcctcaatcggcgttaaacccgccaccagatgggcattaaacgagtatcccggcagcaggggatcattttgcgcttcagccatacttttcatactcccgccattcagagaagaaaccaattgtccatattgcatcagacattgccgtcactgcgtcttttactggctcttctcgctaaccaaaccggtaaccccgcttattaaaagcattctgtaacaaagcgggaccaaagccatgacaaaaacgcgtaacaaaagtgtctataatcacggcagaaaagtccacattgattatttgcacggcgtcacactttgctatgccatagcatttttatccataagattagcggatcctacctgacgctttttatcgcaactctctactgtttctccatacccgggatccgaattcgagcgaaggagatatacatatgtttttgcaaagacctaaaccttacagcgatgaaagtttagaaagtttctttatccgagtggctaacaaaaatggctacggtgatgtccatcgcttcctagaagccactaaacgattccttcaagacattgaccataatggctatcaaacctttccgactgatataactcggataaacccatactcagctaaaaacagttccagcgcacgaactgcgtcattcctgaaacttgcacaattgacatttaatgaaccgccagagctacttgggttggcaattaacagaacaaacatgaaatactcgccgtcaactagcgcggttgttagaggtgcagaagtctttcctcgcagtttactacggacgcactccatcccctgctgtcctttgtgtctgcgagaaaatggctacgcctcctacctttggcactttcaggggtacgaatactgccacagccataacgtacctttaattaccacttgtagctgtggtaaggagtttgactaccgagtatctgggttaaagggcatttgctgcaaatgcaaggagcctatcaccttaaccagcagggagaacggtcatgaggcagcgtgtactgtttcaaactggcttgctggccatgaatctaaacctctgccaaatcttcctaaaagctaccgatggggtttagttcattggtggatgggtattaaagatagcgagttcgatcacttttcgttcgttcaatttttctcaaactggccaaggtcattccactcgataatcgaagatgaagtagagttcaaccttgagcatgctgttgtcagcacgtctgaattacgactaaaagatcttcttggtcgattgtttttcggttcaattcggttacctgagcggaatcttcaacacaatatcatccttggtgagcttctctgctatttagaaaatcgtttatggcaagacaagggattaatcgccaacctcaaaatgaacgcgttagaggcgactgtaatgttaaattgtagcctcgatcagattgcatcaatggttgaacaacgcatcttgaagccaaatcgaaaaagcaagcccaacagccctcttgatgttaccgattatctatttcatttcggcgatattttctgtctttggttagctgagttccaaagcgatgagtttaaccgttcgttttatgtgtcgaggtggtaaatgcaaactctgaaagaactaatcgcatccaatcctgacgacttaacaactgaacttaagagagcatttcgtccactcacaccgcatattgcaattgatggtaatgaacttgacgcactgacgatattagtcaatttaaccgataagactgatgatcagaaagacctgctcgatcgagccaaatgcaagcaaaaacttcgagatgaaaaatggtgggctagctgcataaattgcgttaattacagacaaagccataacccaaaattcccggatatacgttctgaaggcgtgattcgaacccaagccctgggtgaattaccgagtttcctactctcgtcctcaaaaatcccaccataccattggtcatatagccatgattcaaaatacgtcaacaaaagcgcattcctcaccaatgagttttgttgggatggtgagatctcatgtttgggtgagcttcttaaagatgcagatcacccactttggaatactttgaaaaagttaggttgttctcaaaaaacttgcaaagcaatggcaaaacaactagctgatattactctcacgactatcaatgtcacactcgcaccaaattacctgactcaaatatctctccccgatagtgatacatcctacatttcactctctcctgttgcatcgctatcgatgcaaagccactttcatcagaggctccaagatgaaaatcggcatagcgcgataacgcggtttagccgaactaccaacatgggggtcactgcgatgacatgtggcggcgcatttagaatgttaaagtctggcgctaagttttccagcccccctcatcaccgattaaacagtaaacgaagttggttgacgtcagagcatgttcagtcattaaaacagtaccagcgcctcaacaaaagcctcatacctgaaaactctcggattgcactccgtagaaaatacaaaatcgagcttcaaaatatggtcagatcttggtttgcaatgcaagaccatacccttgattcgaacatacttatccaacatttgaatcatgacctatcttacttaggagccacaaaacgttttgcatacgatccagcgatgaccaagctctttactgagcttttgaaacgagagttatcaaattcaatcaataatggtgagcaacacactaatggatcgtttttagtcctaccgaatatcagggtttgtggcgcaacagctttaagctccccggtaacggtggggattccatcacttacagctttctttggcttcgttcacgcatttgaacggaatataaatcgcaccacctcatcgtttcgtgttgaatcctttgcgatatgcgtccatcaactacatgtcgagaagcgaggtttgacagcagagtttgtggaaaaaggcgacgggactatatccgctcccgcgacccgggatgactggcagtgtgatgtcgtatttagccttattttgaacaccaactttgctcaacatattgaccaagatacgttagttacatcactaccaaagcgattggctcggggttcagcaaaaattgcgattgatgactttaaacatatcaactcattctcgacattagaaacagcgatcgaatctctgccaatagaagctggtaggtggttatcactttacgcacagtcaaacaataatctaagtgatctattagcagccatgacagaggaccatcagctcatggcaagctgcgtcggttaccacttgttagaagagcccaaagataaaccaaactccctcagaggttacaaacacgctatcgccgagtgcatcattggactcattaactcaatcacctttagctcagagactgatcccaacacaatcttttggtcgctaaagaactatcaaaactacctagtggtacagccaaggagtatcaacgatgaaactaccgacaaatctagcctatgagcgctctatcgacccatcagatgtctgtttttttgtcgtctggcccgatgatagaaaaacacctttaacctacaattctcgtactctgctcgggcaaatggaagcggcatcattagcctatgatgtctcaggtcaaccaataaaaagtgccaccgctgaggcgttagctcaagggaaccctcatcaagttgatttctgccacgttccatacggtgcgagtcatattgaatgcagtttctccgtctcgttttcttctgaactacgtcaaccatataagtgtaactcaagcaaagttaaacaaacgctagtgcaattagtcgagctctacgaaacgaaaatcggctggactgagctagcaacccgatatttgatgaacatttgcaacggtaaatggctgtggaaaaatacccgtaaagcctattgctggaacattgtacttacaccttggccttggaacggggaaaaggttggatttgaagatattcgtactaactacacctcacggcaagactttaaaaataataaaaattggtctgctatagttgaaatgatcaaaaccgcattttctagtactgatgggctggcgatatttgaagtcagggccaccttgcacttgccaacgaatgctatggtgcggccaagccaagttttcacagaaaaagaaagtggcagtaaaagtaaatctaaaactcaaaacagtcgagtttttcagagtacaactattgatggtgaacgatcgccaatactaggggcctttaaaacgggagcagctattgcaaccattgacgactggtatcctgaagccactgagccactaagggtcggacggtttggggttcatcgcgaagatgtcacttgctaccgtcatccgtctaccggaaaagattttttctcgatattacaacaagcagagcactatattgaagtgttgagcgccaacaaaactcccgctcaagaaactatcaacgacatgcactttttaatggctaacctgattaagggtgggatgttccagcataaaggagactgactgtgaaatggtattataagacaatcacctttctgccagagttgtgcaacaacgagtcactggctgcaaagtgtctccgcgttctgcatggatttaactatcagtatgagacacgaaatatcggcgtttcatttccgctttggtgtgatgcaacggttggaaaaaagatttcatttgtcagcaagaacaagatagaactcgacttactacttaaacaacactatttcgtccaaatggaacaacttcaatactttcatatatccaacactgttctcgtcccagaagattgtacatacgtttcctttagacgctgtcaatctatagataagctcacagcagcagggctggcaaggaaaatcagacgcctggagaaacgtgctctatctagaggcgagcaatttgacccatcatcttttgctcaaaaagagcatactgcaatagcgcactaccactcacttggggagtccagcaaacagacgaaccgcaactttcgactcaatatcaggatgctctcggagcaaccccgtgaggggaactcgatttttagtagctatggcttatcaaattcagaaaactcgtttcagcctgtacccttaatctgacctttaataaggagatataccatggcgacaagtttacctacgccctcagcaattacgacttcggcgttagagtatgcattccatactcccgctcgcaatctaacgaaatctcgcggaaaaaacattcatcgttatgtcagtgtaaagatgagtaagaggattacggtagaatctactctagagtgtgatgcctgctatcactttgattttgagccaagtattgttcgcttttgcgctcaaccgattcgatttttatattatctcaatggtcagtctcactcctatgttcctgactttctagttcaatttgataccaacgagtttgttctatatgaagtaaagtcagcttatgctaagaacaaacctgattttgatgttgaatgggaggcgaaagtaaaagcagcaactgaactagggctagaattggagcttgttgaagagagtgatattagggatacggttgtattaaataatcttaagcgcatgcatcgttatgcttcgaaagatgagctgaataacgtacataactctctcttaaaaataataaagtacaatggcgcccaatctgcaagatgcttgggagaacagttgggtttaaaaggccgaactgttttaccaattttgtgcgatttgctgtcaaggtgtttactcgatacacgtttggataagcctctatctcttgaatctcgatttgagttggccagttatggctaagaaagggttctcaagtttccatagaaaagcagtctcttcccaagatacgcttgaatcgatagagcttgtctctagcgctaattgtctagaaagtgttacgtatcaagatatatcagcatttcccgaaacaattgcggtagagattaatttccgattaagcattcttcgctttttagcgcgaaagtgcgaaaccattgtggccaaatcaattgaaccacatcgtgtagagctacagcaaaactatagtagaaaaatacccagtgcaataacgatatatcgatggtggcttgcttttcgaaaatcagactacaaccccattagcttagcacctaatatcaaggatagaggtaatagagagacaaaagtgtcaacagttgttgattctattatggaacaggcagttgaaagagttatatctggacgaaaagtcaatgttagctctgcatataaacgtgttcgacgaaaagttcgtcaatacaatctaactcatggaacgaaatacacgtatcctaagtacgaatctgtaagaaagcgagtaaaaaagaaaaccccatttgagttattagccgcagggaaaggggagagagtagctaagagagagtttcgccgaatgggaaaaaagatcctcacgtctagcgtgctagagagggttgaaatagatcacactgtcgttgacctttttgcagtacacgaagagtatcgaatcccattgggccgaccttggcttactcaattggttgattgttacagtaaagctgtaatcggtttttatttaggtttcgagcctcctagctatgtgtcggtttcccttgcacttaagaatgcaatacaacgcaaagatgacttaatctcctcgtatgaatcgatcgagaatgaatggctatgttatggcatcccagacctactcgtaactgataatggtaaagagtttttgtcgaaagcatttgatcaagcatgtgaatcactattgatcaatgtgcatcaaaataaagttgagacgcccgacaacaaacctcatgttgaacgtaactacgggactattaatacttctctgttagacgatttacctgggaaatccttcagccagtaccttcaaagagaagggtacgactctgtgggagaagctacccttacactcaatgagattagagaaatttacttaatttggttggtggatatttatcataaaaaacccaatcagagaggcactaattgtcctaatgttgcgtggaaaaagggttgtcaagaatgggaaccagaggagttctctggttctaaagacgaattagactttaaatttgctattgttgattacaaacaacttactaaagtagggataactgtctacaaagaactgagttatagcaatgaccgtttagctgaatatagagggaagaaaggaaaccataaagttcagttcaagtataaccctgagtgtatggcagttatttgggtgttggatgaggatatgaatgagtactttacagttaatgcgattgactacgaatatgcaagtagagtatcactttggcaacataaatataacatgaaatatcaagcagaactaaattcagcagaatatgatgaggacaaggaaattgatgcagaaataaaaattgaagaaatcgcagatcgttcaattgttaagactaacaaaatcagagctcggaggcgtggcgctaggcatcaagagaatagcgcaagggctaagtcaatcagtaatgcgaacccggcctcgatacaaaaacatgaagatgaaatcgttagtgcagataatgacgattgggatattgattatgtctgagaaatcgtcaaatgagtgaaacgcgtgaggctcgtatatcaagagctaaaagggcatttgtatccacaccgagcgttaggaaaatcttgagttacatggatagatgtagagatctatcagacctagagtctgagcctacatgcatgatggtctatggtgcttcgggtgtaggtaaaacgaccgtcatcaagaaatacttaaatcaaaacagaagagagtccgaagccgggggcgatataataccggttttgcatattgagttgccagacaatgcgaagccagtagatgcagcaagggaattgctggttgaaatgggtgacccgctagcactttatgaaactgacttagctagattgacgaaaagactgactgaattaatccctgcggtcggcgtgaagctgattattatcgatgagttccaacatttggtggaagaaaggtcaaatcgggttcttacccaagtaggtaattggctaaaaatgatacttaacaaaacgaaatgtccaattgttatatttggtatgccatactcaaaagttgtactgcaagcaaactcgcaacttcacgggcgattttccattcaggttgaactgcgcccctttagctaccagggaggtagaggtgtatttaaaacttttttggaataccttgataaagccctaccttttgaaaaacaggctggcttagccaacgaaagtttgcagaaaaaattgtatgcattctctcagggaaacatgcgttcgttgagaaaccttatttatcaagcatctatcgaagcaattgataatcagcatgagacgataaccgaagaagatttcgtttttgcatcgaagttgacatcgggcgataaacccaactcatggaaaaatccttttgaggagggtgttgaggtaacagaagatatgttacgaccgccaccaaaagatattggttgggaggactatttgagacattcaaccccgagagtgagtaaaccaggtagaaataaaaactttttcgaataacctaggctgctgcgctgctgccaccgctgagcaataactagcataaccccttggggcctctaaacgggtcttgaggggttttttgctgaaacctcaggcattgaacctgcacggtaccgagctcgaattcactggccgtcgttttacaacgtcgtgactgggaaaaccctggcgttacccaacttaatcgccttgctatcgtggccggatcttgcggcccctcggcttgaacgaattgttagacattatttgccgactaccttggtgatctcgcctttcacgtagtggacaaattcttccaactgatctgcgcgcgaggccaagcgatcttcttcttgtccaagataagcctgtctagcttcaagtatgacgggctgatactgggccggcaggcgctccattgcccagtcggcagcgacatccttcggcgcgattttgccggttactgcgctgtaccaaatgcgggacaacgtaagcactacatttcgctcatcgccagcccagtcgggcggcgagttccatagcgttaaggtttcatttagcgcctcaaatagatcctgttcaggaaccggatcaaagagttcctccgccgctggacctaccaaggcaacgctatgttctcttgcttttgtcagcaagatagccagatcaatgtcgatcgtggctggctcgaagatacctgcaagaatgtcattgcgctgccattctccaaattgcagttcgcgcttagctggataacgccacggaatgatgtcgtcgtgcacaacaatggtgacttctacagcgcggagaatctcgctctctccaggggaagccgaagtttccaaaaggtcgttgatcaaagctcgccgcgttgtttcatcaagccttacggtcaccgtaaccagcaaatcaatatcactgtgtggcttcaggccgccatccactgcggagccgtacaaatgtacggccagcaacgtcggttcgagatggcgctcgatgacgccaactacctctgatagttgagtcgatacttcggcgatcaccgcttccctcatactcttcctttttcaatattattgaagcatttatcagggttattgtctcatgagcggatacatatttgaatgtatttagaaaaataaacaaatagctagctcactcggtcgctacgctccgggcgtgagactgcggcgggcgctgcggacacatacaaagttacccacagattccgtggataagcaggggactaacatgtgaggcaaaacagcagggccgcgccggtggcgtttttccataggctccgccctcctgccagagttcacataaacagacgcttttccggtgcatctgtgggagccgtgaggctcaaccatgaatctgacagtacgggcgaaacccgacaggacttaaagatccccaccgtttccggcgggtcgctccctcttgcgctctcctgttccgaccctgccgtttaccggatacctgttccgcctttctcccttacgggaagtgtggcgctttctcatagctcacacactggtatctcggctcggtgtaggtcgttcgctccaagctgggctgtaagcaagaactccccgttcagcccgactgctgcgccttatccggtaactgttcacttgagtccaacccggaaaagcacggtaaaacgccactggcagcagccattggtaactgggagttcgcagaggatttgtttagctaaacacgcggttgctcttgaagtgtgcgccaaagtccggctacactggaaggacagatttggttgctgtgctctgcgaaagccagttaccacggttaagcagttccccaactgacttaaccttcgatcaaaccacctccccaggtggttttttcgtttacagggcaaaagattacgcgcagaaaaaaaggatctcaagaagatcctttgatcttttctactgaaccgctctagatttcagtgcaatttatctcttcaaatgtagcacctgaagtcagccccatacgatataagttgtaattctcatgttagtcatgccccgcgcccaccggaaggagctgactgggttgaaggctctcaagggcatcggtcgcacgcttgtgttgacagctagctcagtcctaggtataatactagtcacgtgaactgccgagtaggtagctgataaccatattcttgagccacttcattataaagctcagtgaactgccgagtaggtagctgataactcga

SEQ ID NO: 8 - DNA, 11912 bp, synthetic construct
  source 1..11912: mol_type = other DNA
gagatccggctgctaacaaacccgcttaaggaagatggccaacttatttacataaggctgctgccaccgctgagcaataactagcataaccccttggggcctctaaacgggtcttgaggggttttttggtttaaacccatctaattgggaattccccctgcctcgcgcgtttcggtgatgacggtgaaaacctctgacacagcgatcgcttatgacaacttgacggctacatcattcactttttcttcacaaccggcacggaactcgctcgggctggccccggtgcattttttaaatacccgcgagaaatagagttgatcgtcaaaaccaacattgcgaccgacggtggcgataggcatccgggtggtgctcaaaagcagcttcgcctggctgatacgttggtcctcgcgccagcttaagacgctaatccctaactgctggcggaaaagatgtgacagacgcgacggcgacaagcaaacatgctgtgcgacgctggcgatatcaaaattgctgtctgccaggtgatcgctgatgtactgacaagcctcgcgtacccgattatccatcggtggatggagcgactcgttaatcgcttccatgcgccgcagtaacaattgctcaagcagatttatcgccagcagctccgaatagcgcccttccccttgcccggcgttaatgatttgcccaaacaggtcgctgaaatgcggctggtgcgcttcatccgggcgaaagaaccccgtattggcaaatattgacggccagttaagccattcatgccagtaggcgcgcggacgaaagtaaacccactggtgataccattcgcgagcctccggatgacgaccgtagtgatgaatctctcctggcgggaacagcaaaatatcacccggtcggcaaacaaattctcgtccctgatttttcaccaccccctgaccgcgaatggtgagattgagaatataacctttcattcccagcggtcggtcgataaaaaaatcgagataaccgttggcctcaatcggcgttaaacccgccaccagatgggcattaaacgagtatcccggcagcaggggatcattttgcgcttcagccatacttttcatactcccgccattcagagaagaaaccaattgtccatattgcatcagacattgccgtcactgcgtcttttactggctcttctcgctaaccaaaccggtaaccccgcttattaaaagcattctgtaacaaagcgggaccaaagccatgacaaaaacgcgtaacaaaagtgtctataatcacggcagaaaagtccacattgattatttgcacggcgtcacactttgctatgccatagcatttttatccataagattagcggatcctacctgacgctttttatcgcaactctctactgtttctccatacccgggatccgaattcgagcgaaggagatatacatatgtttttgcaaagacctaaaccttacagcgatgaaagtttagaaagtttctttatccgagtggctaacaaaaatggctacggtgatgtccatcgcttcctagaagccactaaacgattccttcaagacattgaccataatggctatcaaacctttccgactgatataactcggataaacccatactcagctaaaaacagttccagcgcacgaactgcgtcattcctgaaacttgcacaattgacatttaatgaaccgccagagctacttgggttggcaattaacagaacaaacatgaaatactcgccgtcaactagcgcggttgttagaggtgcagaagtctttcctcgcagtttactacggacgcactccatcccctgctgtcctttgtgtctgcgagaaaatggctacgcctcctacctttggcactttcaggggtacgaatactgccacagccataacgtacctttaattaccacttgtagctgtggtaaggagtttgactaccgagtatctgggttaaagggcatttgctgcaaatgcaaggagcctatcaccttaaccagcagggagaacggtcatgaggcagcgtgtactgtttcaaactggcttgctggccatgaatctaaacctctgccaaatcttcctaaaagctaccgatggggtttagttcattggtggatgggtattaaagatagcgagttcgatcacttttcgttcgttcaatttttctcaaactggccaaggtcattccactcgataatcgaagatgaagtagagttcaaccttgagcatgctgttgtcagcacgtctgaattacgactaaaagatcttcttggtcgattgtttttcggttcaattcggttacctgagcggaatcttcaacacaatatcatccttggtgagcttctctgctatttagaaaatcgtttatggcaagacaagggattaatcgccaacctcaaaatgaacgcgttagaggcgactgtaatgttaaattgtagcctcgatcagattgcatcaatggttgaacaacgcatcttgaagccaaatcgaaaaagcaagcccaacagccctcttgatgttaccgattatctatttcatttcggcgatattttctgtctttggttagctgagttccaaagcgatgagtttaaccgttcgttttatgtgtcgaggtggtaaatgcaaactctgaaagaactaatcgcatccaatcctgacgacttaacaactgaacttaagagagcatttcgtccactcacaccgcatattgcaattgatggtaatgaacttgacgcactgacgatattagtcaatttaaccgataagactgatgatcagaaagacctgctcgatcgagccaaatgcaagcaaaaacttcgagatgaaaaatggtgggctagctgcataaattgcgttaattacagacaaagccataacccaaaattcccggatatacgttctgaaggcgtgattcgaacccaagccctgggtgaattaccgagtttcctactctcgtcctcaaaaatcccaccataccattggtcatatagccatgattcaaaatacgtcaacaaaagcgcattcctcaccaatgagttttgttgggatggtgagatctcatgtttgggtgagcttcttaaagatgcagatcacccactttggaatactttgaaaaagttaggttgttctcaaaaaacttgcaaagcaatggcaaaacaactagctgatattactctcacgactatcaatgtcacactcgcaccaaattacctgactcaaatatctctccccgatagtgatacatcctacatttcactctctcctgttgcatcgctatcgatgcaaagccactttcatcagaggctccaagatgaaaatcggcatagcgcgataacgcggtttagccgaactaccaacatgggggtcactgcgatgacatgtggcggcgcatttagaatgttaaagtctggcgctaagttttccagcccccctcatcaccgattaaacagtaaacgaagttggttgacgtcagagcatgttcagtcattaaaacagtaccagcgcctcaacaaaagcctcatacctgaaaactctcggattgcactccgtagaaaatacaaaatcgagcttcaaaatatggtcagatcttggtttgcaatgcaagaccatacccttgattcgaacatacttatccaacatttgaatcatgacctatcttacttaggagccacaaaacgttttgcatacgatccagcgatgaccaagctctttactgagcttttgaaacgagagttatcaaattcaatcaataatggtgagcaacacactaatggatcgtttttagtcctaccgaatatcagggtttgtggcgcaacagctttaagctccccggtaacggtggggattccatcacttacagctttctttggcttcgttcacgcatttgaacggaatataaatcgcaccacctcatcgtttcgtgttgaatcctttgcgatatgcgtccatcaactacatgtcgagaagcgaggtttgacagcagagtttgtggaaaaaggcgacgggactatatccgctcccgcgacccgggatgactggcagtgtgatgtcgtatttagccttattttgaacaccaactttgctcaacatattgaccaagatacgttagttacatcactaccaaagcgattggctcggggttcagcaaaaattgcgattgatgactttaaacatatcaactcattctcgacattagaaacagcgatcgaatctctgccaatagaagctggtaggtggttatcactttacgcacagtcaaacaataatctaagtgatctattagcagccatgacagaggaccatcagctcatggcaagctgcgtcggttaccacttgttagaagagcccaaagataaaccaaactccctcagaggttacaaacacgctatcgccgagtgcatcattggactcattaactcaatcacctttagctcagagactgatcccaacacaatcttttggtcgctaaagaactatcaaaactacctagtggtacagccaaggagtatcaacgatgaaactaccgacaaatctagcctatgagcgctctatcgacccatcagatgtctgtttttttgtcgtctggcccgatgatagaaaaacacctttaacctacaattctcgtactctgctcgggcaaatggaagcggcatcattagcctatgatgtctcaggtcaaccaataaaaagtgccaccgctgaggcgttagctcaagggaaccctcatcaagttgatttctgccacgttccatacggtgcgagtcatattgaatgcagtttctccgtctcgttttcttctgaactacgtcaaccatataagtgtaactcaagcaaagttaaacaaacgctagtgcaattagtcgagctctacgaaacgaaaatcggctggactgagctagcaacccgatatttgatgaacatttgcaacggtaaatggctgtggaaaaatacccgtaaagcctattgctggaacattgtacttacaccttggccttggaacggggaaaaggttggatttgaagatattcgtactaactacacctcacggcaagactttaaaaataataaaaattggtctgctatagttgaaatgatcaaaaccgcattttctagtactgatgggctggcgatatttgaagtcagggccaccttgcacttgccaacgaatgctatggtgcggccaagccaagttttcacagaaaaagaaagtggcagtaaaagtaaatctaaaactcaaaacagtcgagtttttcagagtacaactattgatggtgaacgatcgccaatactaggggcctttaaaacgggagcagctattgcaaccattgacgactggtatcctgaagccactgagccactaagggtcggacggtttggggttcatcgcgaagatgtcacttgctaccgtcatccgtctaccggaaaagattttttctcgatattacaacaagcagagcactatattgaagtgttgagcgccaacaaaactcccgctcaagaaactatcaacgacatgcactttttaatggctaacctgattaagggtgggatgttccagcataaaggagactgactgtgaaatggtattataagacaatcacctttctgccagagttgtgcaacaacgagtcactggctgcaaagtgtctccgcgttctgcatggatttaactatcagtatgagacacgaaatatcggcgtttcatttccgctttggtgtgatgcaacggttggaaaaaagatttcatttgtcagcaagaacaagatagaactcgacttactacttaaacaacactatttcgtccaaatggaacaacttcaatactttcatatatccaacactgttctcgtcccagaagattgtacatacgtttcctttagacgctgtcaatctatagataagctcacagcagcagggctggcaaggaaaatcagacgcctggagaaacgtgctctatctagaggcgagcaatttgacccatcatcttttgctcaaaaagagcatactgcaatagcgcactaccactcacttggggagtccagcaaacagacgaaccgcaactttcgactcaatatcaggatgctctcggagcaaccccgtgaggggaactcgatttttagtagctatggcttatcaaattcagaaaactcgtttcagcctgtacccttaatctgacctttaataaggagatataccatggcgacaagtttacctacgccctcagcaattacgacttcggcgttagagtatgcattccatactcccgctcgcaatctaacgaaatctcgcggaaaaaacattcatcgttatgtcagtgtaaagatgagtaagaggattacggtagaatctactctagagtgtgatgcctgctatcactttgattttgagccaagtattgttcgcttttgcgctcaaccgattcgatttttatattatctcaatggtcagtctcactcctatgttcctgactttctagttcaatttgataccaacgagtttgttctatatgaagtaaagtcagcttatgctaagaacaaacctgattttgatgttgaatgggaggcgaaagtaaaagcagcaactgaactagggctagaattggagcttgttgaagagagtgatattagggatacggttgtattaaataatcttaagcgcatgcatcgttatgcttcgaaagatgagctgaataacgtacataactctctcttaaaaataataaagtacaatggcgcccaatctgcaagatgcttgggagaacagttgggtttaaaaggccgaactgttttaccaattttgtgcgatttgctgtcaaggtgtttactcgatacacgtttggataagcctctatctcttgaatctcgatttgagttggccagttatggctaagaaagggttctcaagtttccatagaaaagcagtctcttcccaagatacgcttgaatcgatagagcttgtctctagcgctaattgtctagaaagtgttacgtatcaagatatatcagcatttcccgaaacaattgcggtagagattaatttccgattaagcattcttcgctttttagcgcgaaagtgcgaaaccattgtggccaaatcaattgaaccacatcgtgtagagctacagcaaaactatagtagaaaaatacccagtgcaataacgatatatcgatggtggcttgcttttcgaaaatcagactacaaccccattagcttagcacctaatatcaaggatagaggtaatagagagacaaaagtgtcaacagttgttgattctattatggaacaggcagttgaaagagttatatctggacgaaaagtcaatgttagctctgcatataaacgtgttcgacgaaaagttcgtcaatacaatctaactcatggaacgaaatacacgtatcctaagtacgaatctgtaagaaagcgagtaaaaaagaaaaccccatttgagttattagccgcagggaaaggggagagagtagctaagagagagtttcgccgaatgggaaaaaagatcctcacgtctagcgtgctagagagggttgaaatagatcacactgtcgttgacctttttgcagtacacgaagagtatcgaatcccattgggccgaccttggcttactcaattggttgattgttacagtaaagctgtaatcggtttttatttaggtttcgagcctcctagctatgtgtcggtttcccttgcacttaagaatgcaatacaacgcaaagatgacttaatctcctcgtatgaatcgatcgagaatgaatggctatgttatggcatcccagacctactcgtaactgataatggtaaagagtttttgtcgaaagcatttgatcaagcatgtgaatcactattgatcaatgtgcatcaaaataaagttgagacgcccgacaacaaacctcatgttgaacgtaactacgggactattaatacttctctgttagacgatttacctgggaaatccttcagccagtaccttcaaagagaagggtacgactctgtgggagaagctacccttacactcaatgagattagagaaatttacttaatttggttggtggatatttatcataaaaaacccaatcagagaggcactaattgtcctaatgttgcgtggaaaaagggttgtcaagaatgggaaccagaggagttctctggttctaaagacgaattagactttaaatttgctattgttgattacaaacaacttactaaagtagggataactgtctacaaagaactgagttatagcaatgaccgtttagctgaatatagagggaagaaaggaaaccataaagttcagttcaagtataaccctgagtgtatggcagttatttgggtgttggatgaggatatgaatgagtactttacagttaatgcgattgactacgaatatgcaagtagagtatcactttggcaacataaatataacatgaaatatcaagcagaactaaattcagcagaatatgatgaggacaaggaaattgatgcagaaataaaaattgaagaaatcgcagatcgttcaattgttaagactaacaaaatcagagctcggaggcgtggcgctaggcatcaagagaatagcgcaagggctaagtcaatcagtaatgcgaacccggcctcgatacaaaaacatgaagatgaaatcgttagtgcagataatgacgattgggatattgattatgtctgagaaatcgtcaaatgagtgaaacgcgtgaggctcgtatatcaagagctaaaagggcatttgtatccacaccgagcgttaggaaaatcttgagttacatggatagatgtagagatctatcagacctagagtctgagcctacatgcatgatggtctatggtgcttcgggtgtaggtaaaacgaccgtcatcaagaaatacttaaatcaaaacagaagagagtccgaagccgggggcgatataataccggttttgcatattgagttgccagacaatgcgaagccagtagatgcagcaagggaattgctggttgaaatgggtgacccgctagcactttatgaaactgacttagctagattgacgaaaagactgactgaattaatccctgcggtcggcgtgaagctgattattatcgatgagttccaacatttggtggaagaaaggtcaaatcgggttcttacccaagtaggtaattggctaaaaatgatacttaacaaaacgaaatgtccaattgttatatttggtatgccatactcaaaagttgtactgcaagcaaactcgcaacttcacgggcgattttccattcaggttgaactgcgcccctttagctaccagggaggtagaggtgtatttaaaacttttttggaataccttgataaagccctaccttttgaaaaacaggctggcttagccaacgaaagtttgcagaaaaaattgtatgcattctctcagggaaacatgcgttcgttgagaaaccttatttatcaagcatctatcgaagcaattgataatcagcatgagacgataaccgaagaagatttcgtttttgcatcgaagttgacatcgggcgataaacccaactcatggaaaaatccttttgaggagggtgttgaggtaacagaagatatgttacgaccgccaccaaaagatattggttgggaggactatttgagacattcaaccccgagagtgagtaaaccaggtagaaataaaaactttttcgaataacctaggctgctgcgctgctgccaccgctgagcaataactagcataaccccttggggcctctaaacgggtcttgaggggttttttgctgaaacctcaggcattgaacctgcacggtaccgagctcgaattcactggccgtcgttttacaacgtcgtgactgggaaaaccctggcgttacccaacttaatcgccttgctatcgtggccggatcttgcggcccctcggcttgaacgaattgttagacattatttgccgactaccttggtgatctcgcctttcacgtagtggacaaattcttccaactgatctgcgcgcgaggccaagcgatcttcttcttgtccaagataagcctgtctagcttcaagtatgacgggctgatactgggccggcaggcgctccattgcccagtcggcagcgacatccttcggcgcgattttgccggttactgcgctgtaccaaatgcgggacaacgtaagcactacatttcgctcatcgccagcccagtcgggcggcgagttccatagcgttaaggtttcatttagcgcctcaaatagatcctgttcaggaaccggatcaaagagttcctccgccgctggacctaccaaggcaacgctatgttctcttgcttttgtcagcaagatagccagatcaatgtcgatcgtggctggctcgaagatacctgcaagaatgtcattgcgctgccattctccaaattgcagttcgcgcttagctggataacgccacggaatgatgtcgtcgtgcacaacaatggtgacttctacagcgcggagaatctcgctctctccaggggaagccgaagtttccaaaaggtcgttgatcaaagctcgccgcgttgtttcatcaagccttacggtcaccgtaaccagcaaatcaatatcactgtgtggcttcaggccgccatccactgcggagccgtacaaatgtacggccagcaacgtcggttcgagatggcgctcgatgacgccaactacctctgatagttgagtcgatacttcggcgatcaccgcttccctcatactcttcctttttcaatattattgaagcatttatcagggttattgtctcatgagcggatacatatttgaatgtatttagaaaaataaacaaatagctagctcactcggtcgctacgctccgggcgtgagactgcggcgggcgctgcggacacatacaaagttacccacagattccgtggataagcaggggactaacatgtgaggcaaaacagcagggccgcgccggtggcgtttttccataggctccgccctcctgccagagttcacataaacagacgcttttccggtgcatctgtgggagccgtgaggctcaaccatgaatctgacagtacgggcgaaacccgacaggacttaaagatccccaccgtttccggcgggtcgctccctcttgcgctctcctgttccgaccctgccgtttaccggatacctgttccgcctttctcccttacgggaagtgtggcgctttctcatagctcacacactggtatctcggctcggtgtaggtcgttcgctccaagctgggctgtaagcaagaactccccgttcagcccgactgctgcgccttatccggtaactgttcacttgagtccaacccggaaaagcacggtaaaacgccactggcagcagccattggtaactgggagttcgcagaggatttgtttagctaaacacgcggttgctcttgaagtgtgcgccaaagtccggctacactggaaggacagatttggttgctgtgctctgcgaaagccagttaccacggttaagcagttccccaactgacttaaccttcgatcaaaccacctccccaggtggttttttcgtttacagggcaaaagattacgcgcagaaaaaaaggatctcaagaagatcctttgatcttttctactgaaccgctctagatttcagtgcaatttatctcttcaaatgtagcacctgaagtcagccccatacgatataagttgtaattctcatgttagtcatgccccgcgcccaccggaaggagctgactgggttgaaggctctcaagggcatcggtcgcacgcttgtgttgacagctagctcagtcctaggtataatactagtcacgtgaactgccgagtaggtagctgataacgcatagcggaggaagcttgcttattggatcaggtgaactgccgagtaggtagctgataactcga

SEQ ID NO: 9 - DNA, 11912 bp, synthetic construct
  source 1..11912: mol_type = other DNA
gagatccggctgctaacaaacccgcttaaggaagatggccaacttatttacataaggctgctgccaccgctgagcaataactagcataaccccttggggcctctaaacgggtcttgaggggttttttggtttaaacccatctaattgggaattccccctgcctcgcgcgtttcggtgatgacggtgaaaacctctgacacagcgatcgcttatgacaacttgacggctacatcattcactttttcttcacaaccggcacggaactcgctcgggctggccccggtgcattttttaaatacccgcgagaaatagagttgatcgtcaaaaccaacattgcgaccgacggtggcgataggcatccgggtggtgctcaaaagcagcttcgcctggctgatacgttggtcctcgcgccagcttaagacgctaatccctaactgctggcggaaaagatgtgacagacgcgacggcgacaagcaaacatgctgtgcgacgctggcgatatcaaaattgctgtctgccaggtgatcgctgatgtactgacaagcctcgcgtacccgattatccatcggtggatggagcgactcgttaatcgcttccatgcgccgcagtaacaattgctcaagcagatttatcgccagcagctccgaatagcgcccttccccttgcccggcgttaatgatttgcccaaacaggtcgctgaaatgcggctggtgcgcttcatccgggcgaaagaaccccgtattggcaaatattgacggccagttaagccattcatgccagtaggcgcgcggacgaaagtaaacccactggtgataccattcgcgagcctccggatgacgaccgtagtgatgaatctctcctggcgggaacagcaaaatatcacccggtcggcaaacaaattctcgtccctgatttttcaccaccccctgaccgcgaatggtgagattgagaatataacctttcattcccagcggtcggtcgataaaaaaatcgagataaccgttggcctcaatcggcgttaaacccgccaccagatgggcattaaacgagtatcccggcagcaggggatcattttgcgcttcagccatacttttcatactcccgccattcagagaagaaaccaattgtccatattgcatcagacattgccgtcactgcgtcttttactggctcttctcgctaaccaaaccggtaaccccgcttattaaaagcattctgtaacaaagcgggaccaaagccatgacaaaaacgcgtaacaaaagtgtctataatcacggcagaaaagtccacattgattatttgcacggcgtcacactttgctatgccatagcatttttatccataagattagcggatcctacctgacgctttttatcgcaactctctactgtttctccatacccgggatccgaattcgagcgaaggagatatacatatgtttttgcaaagacctaaaccttacagcgatgaaagtttagaaagtttctttatccgagtggctaacaaaaatggctacggtgatgtccatcgcttcctagaagccactaaacgattccttcaagacattgaccataatggctatcaaacctttccgactgatataactcggataaacccatactcagctaaaaacagttccagcgcacgaactgcgtcattcctgaaacttgcacaattgacatttaatgaaccgccagagctacttgggttggcaattaacagaacaaacatgaaatactcgccgtcaactagcgcggttgttagaggtgcagaagtctttcctcgcagtttactacggacgcactccatcccctgctgtcctttgtgtctgcgagaaaatggctacgcctcctacctttggcactttcaggggtacgaatactgccacagccataacgtacctttaattaccacttgtagctgtggtaaggagtttgactaccgagtatctgggttaaagggcatttgctgcaaatgcaaggagcctatcaccttaaccagcagggagaacggtcatgaggcagcgtgtactgtttcaaactggcttgctggccatgaatctaaacctctgccaaatcttcctaaaagctaccgatggggtttagttcattggtggatgggtattaaagatagcgagttcgatcacttttcgttcgttcaatttttctcaaactggccaaggtcattccactcgataatcgaagatgaagtagagttcaaccttgagcatgctgttgtcagcacgtctgaattacgactaaaagatcttcttggtcgattgtttttcggttcaattcggttacctgagcggaatcttcaacacaatatcatccttggtgagcttctctgctatttagaaaatcgtttatggcaagacaagggattaatcgccaacctcaaaatgaacgcgttagaggcgactgtaatgttaaattgtagcctcgatcagattgcatcaatggttgaacaacgcatcttgaagccaaatcgaaaaagcaagcccaacagccctcttgatgttaccgattatctatttcatttcggcgatattttctgtctttggttagctgagttccaaagcgatgagtttaaccgttcgttttatgtgtcgaggtggtaaatgcaaactctgaaagaactaatcgcatccaatcctgacgacttaacaactgaacttaagagagcatttcgtccactcacaccgcatattgcaattgatggtaatgaacttgacgcactgacgatattagtcaatttaaccgataagactgatgatcagaaagacctgctcgatcgagccaaatgcaagcaaaaacttcgagatgaaaaatggtgggctagctgcataaattgcgttaattacagacaaagccataacccaaaattcccggatatacgttctgaaggcgtgattcgaacccaagccctgggtgaattaccgagtttcctactctcgtcctcaaaaatcccaccataccattggtcatatagccatgattcaaaatacgtcaacaaaagcgcattcctcaccaatgagttttgttgggatggtgagatctcatgtttgggtgagcttcttaaagatgcagatcacccactttggaatactttgaaaaagttaggttgttctcaaaaaacttgcaaagcaatggcaaaacaactagctgatattactctcacgactatcaatgtcacactcgcaccaaattacctgactcaaatatctctccccgatagtgatacatcctacatttcactctctcctgttgcatcgctatcgatgcaaagccactttcatcagaggctccaagatgaaaatcggcatagcgcgataacgcggtttagccgaactaccaacatgggggtcactgcgatgacatgtggcggcgcatttagaatgttaaagtctggcgctaagttttccagcccccctcatcaccgattaaacagtaaacgaagttggttgacgtcagagcatgttcagtcattaaaacagtaccagcgcctcaacaaaagcctcatacctgaaaactctcggattgcactccgtagaaaatacaaaatcgagcttcaaaatatggtcagatcttggtttgcaatgcaagaccatacccttgattcgaacatacttatccaacatttgaatcatgacctatcttacttaggagccacaaaacgttttgcatacgatccagcgatgaccaagctctttactgagcttttgaaacgagagttatcaaattcaatcaataatggtgagcaacacactaatggatcgtttttagtcctaccgaatatcagggtttgtggcgcaacagctttaagctccccggtaacggtggggattccatcacttacagctttctttggcttcgttcacgcatttgaacggaatataaatcgcaccacctcatcgtttcgtgttgaatcctttgcgatatgcgtccatcaactacatgtcgagaagcgaggtttgacagcagagtttgtggaaaaaggcgacgggactatatccgctcccgcgacccgggatgactggcagtgtgatgtcgtatttagccttattttgaacaccaactttgctcaacatattgaccaagatacgttagttacatcactaccaaagcgattggctcggggttcagcaaaaattgcgattgatgactttaaacatatcaactcattctcgacattagaaacagcgatcgaatctctgccaatagaagctggtaggtggttatcactttacgcacagtcaaacaataatctaagtgatctattagcagccatgacagaggaccatcagctcatggcaagctgcgtcggttaccacttgttagaagagcccaaagataaaccaaactccctcagaggttacaaacacgctatcgccgagtgcatcattggactcattaactcaatcacctttagctcagagactgatcccaacacaatcttttggtcgctaaagaactatcaaaactacctagtggtacagccaaggagtatcaacgatgaaactaccgacaaatctagcctatgagcgctctatcgacccatcagatgtctgtttttttgtcgtctggcccgatgatagaaaaacacctttaacctacaattctcgtactctgctcgggcaaatggaagcggcatcattagcctatgatgtctcaggtcaaccaataaaaagtgccaccgctgaggcgttagctcaagggaaccctcatcaagttgatttctgccacgttccatacggtgcgagtcatattgaatgcagtttctccgtctcgttttcttctgaactacgtcaaccatataagtgtaactcaagcaaagttaaacaaacgctagtgcaattagtcgagctctacgaaacgaaaatcggctggactgagctagcaacccgatatttgatgaacatttgcaacggtaaatggctgtggaaaaatacccgtaaagcctattgctggaacattgtacttacaccttggccttggaacggggaaaaggttggatttgaagatattcgtactaactacacctcacggcaagactttaaaaataataaaaattggtctgctatagttgaaatgatcaaaaccgcattttctagtactgatgggctggcgatatttgaagtcagggccaccttgcacttgccaacgaatgctatggtgcggccaagccaagttttcacagaaaaagaaagtggcagtaaaagtaaatctaaaactcaaaacagtcgagtttttcagagtacaactattgatggtgaacgatcgccaatactaggggcctttaaaacgggagcagctattgcaaccattgacgactggtatcctgaagccactgagccactaagggtcggacggtttggggttcatcgcgaagatgtcacttgctaccgtcatccgtctaccggaaaagattttttctcgatattacaacaagcagagcactatattgaagtgttgagcgccaacaaaactcccgctcaagaaactatcaacgacatgcactttttaatggctaacctgattaagggtgggatgttccagcataaaggagactgactgtgaaatggtattataagacaatcacctttctgccagagttgtgcaacaacgagtcactggctgcaaagtgtctccgcgttctgcatggatttaactatcagtatgagacacgaaatatcggcgtttcatttccgctttggtgtgatgcaacggttggaaaaaagatttcatttgtcagcaagaacaagatagaactcgacttactacttaaacaacactatttcgtccaaatggaacaacttcaatactttcatatatccaacactgttctcgtcccagaagattgtacatacgtttcctttagacgctgtcaatctatagataagctcacagcagcagggctggcaaggaaaatcagacgcctggagaaacgtgctctatctagaggcgagcaatttgacccatcatcttttgctcaaaaagagcatactgcaatagcgcactaccactcacttggggagtccagcaaacagacgaaccgcaactttcgactcaatatcaggatgctctcggagcaaccccgtgaggggaactcgatttttagtagctatggcttatcaaattcagaaaactcgtttcagcctgtacccttaatctgacctttaataaggagatataccatggcgacaagtttacctacgccctcagcaattacgacttcggcgttagagtatgcattccatactcccgctcgcaatctaacgaaatctcgcggaaaaaacattcatcgttatgtcagtgtaaagatgagtaagaggattacggtagaatctactctagagtgtgatgcctgctatcactttgattttgagccaagtattgttcgcttttgcgctcaaccgattcgatttttatattatctcaatggtcagtctcactcctatgttcctgactttctagttcaatttgataccaacgagtttgttctatatgaagtaaagtcagcttatgctaagaacaaacctgattttgatgttgaatgggaggcgaaagtaaaagcagcaactgaactagggctagaattggagcttgttgaagagagtgatattagggatacggttgtattaaataatcttaagcgcatgcatcgttatgcttcgaaagatgagctgaataacgtacataactctctcttaaaaataataaagtacaatggcgcccaatctgcaagatgcttgggagaacagttgggtttaaaaggccgaactgttttaccaattttgtgcgatttgctgtcaaggtgtttactcgatacacgtttggataagcctctatctcttgaatctcgatttgagttggccagttatggctaagaaagggttctcaagtttccatagaaaagcagtctcttcccaagatacgcttgaatcgatagagcttgtctctagcgctaattgtctagaaagtgttacgtatcaagatatatcagcatttcccgaaacaattgcggtagagattaatttccgattaagcattcttcgctttttagcgcgaaagtgcgaaaccattgtggccaaatcaattgaaccacatcgtgtagagctacagcaaaactatagtagaaaaatacccagtgcaataacgatatatcgatggtggcttgcttttcgaaaatcagactacaaccccattagcttagcacctaatatcaaggatagaggtaatagagagacaaaagtgtcaacagttgttgattctattatggaacaggcagttgaaagagttatatctggacgaaaagtcaatgttagctctgcatataaacgtgttcgacgaaaagttcgtcaatacaatctaactcatggaacgaaatacacgtatcctaagtacgaatctgtaagaaagcgagtaaaaaagaaaaccccatttgagttattagccgcagggaaaggggagagagtagctaagagagagtttcgccgaatgggaaaaaagatcctcacgtctagcgtgctagagagggttgaaatagatcacactgtcgttgacctttttgcagtacacgaagagtatcgaatcccattgggccgaccttggcttactcaattggttgattgttacagtaaagctgtaatcggtttttatttaggtttcgagcctcctagctatgtgtcggtttcccttgcacttaagaatgcaatacaacgcaaagatgacttaatctcctcgtatgaatcgatcgagaatgaatggctatgttatggcatcccagacctactcgtaactgataatggtaaagagtttttgtcgaaagcatttgatcaagcatgtgaatcactattgatcaatgtgcatcaaaataaagttgagacgcccgacaacaaacctcatgttgaacgtaactacgggactattaatacttctctgttagacgatttacctgggaaatccttcagccagtaccttcaaagagaagggtacgactctgtgggagaagctacccttacactcaatgagattagagaaatttacttaatttggttggtggatatttatcataaaaaacccaatcagagaggcactaattgtcctaatgttgcgtggaaaaagggttgtcaagaatgggaaccagaggagttctctggttctaaagacgaattagactttaaatttgctattgttgattacaaacaacttactaaagtagggataactgtctacaaagaactgagttatagcaatgaccgtttagctgaatatagagggaagaaaggaaaccataaagttcagttcaagtataaccctgagtgtatggcagttatttgggtgttggatgaggatatgaatgagtactttacagttaatgcgattgactacgaatatgcaagtagagtatcactttggcaacataaatataacatgaaatatcaagcagaactaaattcagcagaatatgatgaggacaaggaaattgatgcagaaataaaaattgaagaaatcgcagatcgttcaattgttaagactaacaaaatcagagctcggaggcgtggcgctaggcatcaagagaatagcgcaagggctaagtcaatcagtaatgcgaacccggcctcgatacaaaaacatgaagatgaaatcgttagtgcagataatgacgattgggatattgattatgtctgagaaatcgtcaaatgagtgaaacgcgtgaggctcgtatatcaagagctaaaagggcatttgtatccacaccgagcgttaggaaaatcttgagttacatggatagatgtagagatctatcagacctagagtctgagcctacatgcatgatggtctatggtgcttcgggtgtaggtaaaacgaccgtcatcaagaaatacttaaatcaaaacagaagagagtccgaagccgggggcgatataataccggttttgcatattgagttgccagacaatgcgaagccagtagatgcagcaagggaattgctggttgaaatgggtgacccgctagcactttatgaaactgacttagctagattgacgaaaagactgactgaattaatccctgcggtcggcgtgaagctgattattatcgatgagttccaacatttggtggaagaaaggtcaaatcgggttcttacccaagtaggtaattggctaaaaatgatacttaacaaaacgaaatgtccaattgttatatttggtatgccatactcaaaagttgtactgcaagcaaactcgcaacttcacgggcgattttccattcaggttgaactgcgcccctttagctaccagggaggtagaggtgtatttaaaacttttttggaataccttgataaagccctaccttttgaaaaacaggctggcttagccaacgaaagtttgcagaaaaaattgtatgcattctctcagggaaacatgcgttcgttgagaaaccttatttatcaagcatctatcgaagcaattgataatcagcatgagacgataaccgaagaagatttcgtttttgcatcgaagttgacatcgggcgataaacccaactcatggaaaaatccttttgaggagggtgttgaggtaacagaagatatgttacgaccgccaccaaaagatattggttgggaggactatttgagacattcaaccccgagagtgagtaaaccaggtagaaataaaaactttttcgaataacctaggctgctgcgctgctgccaccgctgagcaataactagcataaccccttggggcctctaaacgggtcttgaggggttttttgctgaaacctcaggcattgaacctgcacggtaccgagctcgaattcactggccgtcgttttacaacgtcgtgactgggaaaaccctggcgttacccaacttaatcgccttgctatcgtggccggatcttgcggcccctcggcttgaacgaattgttagacattatttgccgactaccttggtgatctcgcctttcacgtagtggacaaattcttccaactgatctgcgcgcgaggccaagcgatcttcttcttgtccaagataagcctgtctagcttcaagtatgacgggctgatactgggccggcaggcgctccattgcccagtcggcagcgacatccttcggcgcgattttgccggttactgcgctgtaccaaatgcgggacaacgtaagcactacatttcgctcatcgccagcccagtcgggcggcgagttccatagcgttaaggtttcatttagcgcctcaaatagatcctgttcaggaaccggatcaaagagttcctccgccgctggacctaccaaggcaacgctatgttctcttgcttttgtcagcaagatagccagatcaatgtcgatcgtggctggctcgaagatacctgcaagaatgtcattgcgctgccattctccaaattgcagttcgcgcttagctggataacgccacggaatgatgtcgtcgtgcacaacaatggtgacttctacagcgcggagaatctcgctctctccaggggaagccgaagtttccaaaaggtcgttgatcaaagctcgccgcgttgtttcatcaagccttacggtcaccgtaaccagcaaatcaatatcactgtgtggcttcaggccgccatccactgcggagccgtacaaatgtacggccagcaacgtcggttcgagatggcgctcgatgacgccaactacctctgatagttgagtcgatacttcggcgatcaccgcttccctcatactcttcctttttcaatattattgaagcatttatcagggttattgtctcatgagcggatacatatttgaatgtatttagaaaaataaacaaatagctagctcactcggtcgctacgctccgggcgtgagactgcggcgggcgctgcggacacatacaaagttacccacagattccgtggataagcaggggactaacatgtgaggcaaaacagcagggccgcgccggtggcgtttttccataggctccgccctcctgccagagttcacataaacagacgcttttccggtgcatctgtgggagccgtgaggctcaaccatgaatctgacagtacgggcgaaacccgacaggacttaaagatccccaccgtttccggcgggtcgctccctcttgcgctctcctgttccgaccctgccgtttaccggatacctgttccgcctttctcccttacgggaagtgtggcgctttctcatagctcacacactggtatctcggctcggtgtaggtcgttcgctccaagctgggctgtaagcaagaactccccgttcagcccgactgctgcgccttatccggtaactgttcacttgagtccaacccggaaaagcacggtaaaacgccactggcagcagccattggtaactgggagttcgcagaggatttgtttagctaaacacgcggttgctcttgaagtgtgcgccaaagtccggctacactggaaggacagatttggttgctgtgctctgcgaaagccagttaccacggttaagcagttccccaactgacttaaccttcgatcaaaccacctccccaggtggttttttcgtttacagggcaaaagattacgcgcagaaaaaaaggatctcaagaagatcctttgatcttttctactgaaccgctctagatttcagtgcaatttatctcttcaaatgtagcacctgaagtcagccccatacgatataagttgtaattctcatgttagtcatgccccgcgcccaccggaaggagctgactgggttgaaggctctcaagggcatcggtcgcacgcttgtgttgacagctagctcagtcctaggtataatactagtcacgtgaactgccgagtaggtagctgataaccacttaaagatgagaggaataccttttttggcgtgaactgccgagtaggtagctgataactcga

SEQ ID NO: 10 - DNA, 11912 bp, synthetic construct
  source 1..11912: mol_type = other DNA
tagctagctcactcggtcgctacgctccgggcgtgagactgcggcgggcgctgcggacacatacaaagttacccacagattccgtggataagcaggggactaacatgtgaggcaaaacagcagggccgcgccggtggcgtttttccataggctccgccctcctgccagagttcacataaacagacgcttttccggtgcatctgtgggagccgtgaggctcaaccatgaatctgacagtacgggcgaaacccgacaggacttaaagatccccaccgtttccggcgggtcgctccctcttgcgctctcctgttccgaccctgccgtttaccggatacctgttccgcctttctcccttacgggaagtgtggcgctttctcatagctcacacactggtatctcggctcggtgtaggtcgttcgctccaagctgggctgtaagcaagaactccccgttcagcccgactgctgcgccttatccggtaactgttcacttgagtccaacccggaaaagcacggtaaaacgccactggcagcagccattggtaactgggagttcgcagaggatttgtttagctaaacacgcggttgctcttgaagtgtgcgccaaagtccggctacactggaaggacagatttggttgctgtgctctgcgaaagccagttaccacggttaagcagttccccaactgacttaaccttcgatcaaaccacctccccaggtggttttttcgtttacagggcaaaagattacgcgcagaaaaaaaggatctcaagaagatcctttgatcttttctactgaaccgctctagatttcagtgcaatttatctcttcaaatgtagcacctgaagtcagccccatacgatataagttgtaattctcatgttagtcatgccccgcgcccaccggaaggagctgactgggttgaaggctctcaagggcatcggtcgcacgcttgtgttgacagctagctcagtcctaggtataatactagtcacgtgaactgccgagtaggtagctgataacttgttaatgagcatgacaatcatgaccgccaagtgaactgccgagtaggtagctgataactcgagagatccggctgctaacaaacccgcttaaggaagatggccaacttatttacataaggctgctgccaccgctgagcaataactagcataaccccttggggcctctaaacgggtcttgaggggttttttggtttaaacccatctaattgggaattccccctgcctcgcgcgtttcggtgatgacggtgaaaacctctgacacagcgatcgcttatgacaacttgacggctacatcattcactttttcttcacaaccggcacggaactcgctcgggctggccccggtgcattttttaaatacccgcgagaaatagagttgatcgtcaaaaccaacattgcgaccgacggtggcgataggcatccgggtggtgctcaaaagcagcttcgcctggctgatacgttggtcctcgcgccagcttaagacgctaatccctaactgctggcggaaaagatgtgacagacgcgacggcgacaagcaaacatgctgtgcgacgctggcgatatcaaaattgctgtctgccaggtgatcgctgatgtactgacaagcctcgcgtacccgattatccatcggtggatggagcgactcgttaatcgcttccatgcgccgcagtaacaattgctcaagcagatttatcgccagcagctccgaatagcgcccttccccttgcccggcgttaatgatttgcccaaacaggtcgctgaaatgcggctggtgcgcttcatccgggcgaaagaaccccgtattggcaaatattgacggccagttaagccattcatgccagtaggcgcgcggacgaaagtaaacccactggtgataccattcgcgagcctccggatgacgaccgtagtgatgaatctctcctggcgggaacagcaaaatatcacccggtcggcaaacaaattctcgtccctgatttttcaccaccccctgaccgcgaatggtgagattgagaatataacctttcattcccagcggtcggtcgataaaaaaatcgagataaccgttggcctcaatcggcgttaaacccgccaccagatgggcattaaacgagtatcccggcagcaggggatcattttgcgcttcagccatacttttcatactcccgccattcagagaagaaaccaattgtccatattgcatcagacattgccgtcactgcgtcttttactggctcttctcgctaaccaaaccggtaaccccgcttattaaaagcattctgtaacaaagcgggaccaaagccatgacaaaaacgcgtaacaaaagtgtctataatcacggcagaaaagtccacattgattatttgcacggcgtcacactttgctatgccatagcatttttatccataagattagcggatcctacctgacgctttttatcgcaactctctactgtttctccatacccgggatccgaattcgagcgaaggagatatacatatgtttttgcaaagacctaaaccttacagcgatgaaagtttagaaagtttctttatccgagtggctaacaaaaatggctacggtgatgtccatcgcttcctagaagccactaaacgattccttcaagacattgaccataatggctatcaaacctttccgactgatataactcggataaacccatactcagctaaaaacagttccagcgcacgaactgcgtcattcctgaaacttgcacaattgacatttaatgaaccgccagagctacttgggttggcaattaacagaacaaacatgaaatactcgccgtcaactagcgcggttgttagaggtgcagaagtctttcctcgcagtttactacggacgcactccatcccctgctgtcctttgtgtctgcgagaaaatggctacgcctcctacctttggcactttcaggggtacgaatactgccacagccataacgtacctttaattaccacttgtagctgtggtaaggagtttgactaccgagtatctgggttaaagggcatttgctgcaaatgcaaggagcctatcaccttaaccagcagggagaacggtcatgaggcagcgtgtactgtttcaaactggcttgctggccatgaatctaaacctctgccaaatcttcctaaaagctaccgatggggtttagttcattggtggatgggtattaaagatagcgagttcgatcacttttcgttcgttcaatttttctcaaactggccaaggtcattccactcgataatcgaagatgaagtagagttcaaccttgagcatgctgttgtcagcacgtctgaattacgactaaaagatcttcttggtcgattgtttttcggttcaattcggttacctgagcggaatcttcaacacaatatcatccttggtgagcttctctgctatttagaaaatcgtttatggcaagacaagggattaatcgccaacctcaaaatgaacgcgttagaggcgactgtaatgttaaattgtagcctcgatcagattgcatcaatggttgaacaacgcatcttgaagccaaatcgaaaaagcaagcccaacagccctcttgatgttaccgattatctatttcatttcggcgatattttctgtctttggttagctgagttccaaagcgatgagtttaaccgttcgttttatgtgtcgaggtggtaaatgcaaactctgaaagaactaatcgcatccaatcctgacgacttaacaactgaacttaagagagcatttcgtccactcacaccgcatattgcaattgatggtaatgaacttgacgcactgacgatattagtcaatttaaccgataagactgatgatcagaaagacctgctcgatcgagccaaatgcaagcaaaaacttcgagatgaaaaatggtgggctagctgcataaattgcgttaattacagacaaagccataacccaaaattcccggatatacgttctgaaggcgtgattcgaacccaagccctgggtgaattaccgagtttcctactctcgtcctcaaaaatcccaccataccattggtcatatagccatgattcaaaatacgtcaacaaaagcgcattcctcaccaatgagttttgttgggatggtgagatctcatgtttgggtgagcttcttaaagatgcagatcacccactttggaatactttgaaaaagttaggttgttctcaaaaaacttgcaaagcaatggcaaaacaactagctgatattactctcacgactatcaatgtcacactcgcaccaaattacctgactcaaatatctctccccgatagtgatacatcctacatttcactctctcctgttgcatcgctatcgatgcaaagccactttcatcagaggctccaagatgaaaatcggcatagcgcgataacgcggtttagccgaactaccaacatgggggtcactgcgatgacatgtggcggcgcatttagaatgttaaagtctggcgctaagttttccagcccccctcatcaccgattaaacagtaaacgaagttggttgacgtcagagcatgttcagtcattaaaacagtaccagcgcctcaacaaaagcctcatacctgaaaactctcggattgcactccgtagaaaatacaaaatcgagcttcaaaatatggtcagatcttggtttgcaatgcaagaccatacccttgattcgaacatacttatccaacatttgaatcatgacctatcttacttaggagccacaaaacgttttgcatacgatccagcgatgaccaagctctttactgagcttttgaaacgagagttatcaaattcaatcaataatggtgagcaacacactaatggatcgtttttagtcctaccgaatatcagggtttgtggcgcaacagctttaagctccccggtaacggtggggattccatcacttacagctttctttggcttcgttcacgcatttgaacggaatataaatcgcaccacctcatcgtttcgtgttgaatcctttgcgatatgcgtccatcaactacatgtcgagaagcgaggtttgacagcagagtttgtggaaaaaggcgacgggactatatccgctcccgcgacccgggatgactggcagtgtgatgtcgtatttagccttattttgaacaccaactttgctcaacatattgaccaagatacgttagttacatcactaccaaagcgattggctcggggttcagcaaaaattgcgattgatgactttaaacatatcaactcattctcgacattagaaacagcgatcgaatctctgccaatagaagctggtaggtggttatcactttacgcacagtcaaacaataatctaagtgatctattagcagccatgacagaggaccatcagctcatggcaagctgcgtcggttaccacttgttagaagagcccaaagataaaccaaactccctcagaggttacaaacacgctatcgccgagtgcatcattggactcattaactcaatcacctttagctcagagactgatcccaacacaatcttttggtcgctaaagaactatcaaaactacctagtggtacagccaaggagtatcaacgatgaaactaccgacaaatctagcctatgagcgctctatcgacccatcagatgtctgtttttttgtcgtctggcccgatgatagaaaaacacctttaacctacaattctcgtactctgctcgggcaaatggaagcggcatcattagcctatgatgtctcaggtcaaccaataaaaagtgccaccgctgaggcgttagctcaagggaaccctcatcaagttgatttctgccacgttccatacggtgcgagtcatattgaatgcagtttctccgtctcgttttcttctgaactacgtcaaccatataagtgtaactcaagcaaagttaaacaaacgctagtgcaattagtcgagctctacgaaacgaaaatcggctggactgagctagcaacccgatatttgatgaacatttgcaacggtaaatggctgtggaaaaatacccgtaaagcctattgctggaacattgtacttacaccttggccttggaacggggaaaaggttggatttgaagatattcgtactaactacacctcacggcaagactttaaaaataataaaaattggtctgctatagttgaaatgatcaaaaccgcattttctagtactgatgggctggcgatatttgaagtcagggccaccttgcacttgccaacgaatgctatggtgcggccaagccaagttttcacagaaaaagaaagtggcagtaaaagtaaatctaaaactcaaaacagtcgagtttttcagagtacaactattgatggtgaacgatcgccaatactaggggcctttaaaacgggagcagctattgcaaccattgacgactggtatcctgaagccactgagccactaagggtcggacggtttggggttcatcgcgaagatgtcacttgctaccgtcatccgtctaccggaaaagattttttctcgatattacaacaagcagagcactatattgaagtgttgagcgccaacaaaactcccgctcaagaaactatcaacgacatgcactttttaatggctaacctgattaagggtgggatgttccagcataaaggagactgactgtgaaatggtattataagacaatcacctttctgccagagttgtgcaacaacgagtcactggctgcaaagtgtctccgcgttctgcatggatttaactatcagtatgagacacgaaatatcggcgtttcatttccgctttggtgtgatgcaacggttggaaaaaagatttcatttgtcagcaagaacaagatagaactcgacttactacttaaacaacactatttcgtccaaatggaacaacttcaatactttcatatatccaacactgttctcgtcccagaagattgtacatacgtttcctttagacgctgtcaatctatagataagctcacagcagcagggctggcaaggaaaatcagacgcctggagaaacgtgctctatctagaggcgagcaatttgacccatcatcttttgctcaaaaagagcatactgcaatagcgcactaccactcacttggggagtccagcaaacagacgaaccgcaactttcgactcaatatcaggatgctctcggagcaaccccgtgaggggaactcgatttttagtagctatggcttatcaaattcagaaaactcgtttcagcctgtacccttaatctgacctttaataaggagatataccatggcgacaagtttacctacgccctcagcaattacgacttcggcgttagagtatgcattccatactcccgctcgcaatctaacgaaatctcgcggaaaaaacattcatcgttatgtcagtgtaaagatgagtaagaggattacggtagaatctactctagagtgtgatgcctgctatcactttgattttgagccaagtattgttcgcttttgcgctcaaccgattcgatttttatattatctcaatggtcagtctcactcctatgttcctgactttctagttcaatttgataccaacgagtttgttctatatgaagtaaagtcagcttatgctaagaacaaacctgattttgatgttgaatgggaggcgaaagtaaaagcagcaactgaactagggctagaattggagcttgttgaagagagtgatattagggatacggttgtattaaataatcttaagcgcatgcatcgttatgcttcgaaagatgagctgaataacgtacataactctctcttaaaaataataaagtacaatggcgcccaatctgcaagatgcttgggagaacagttgggtttaaaaggccgaactgttttaccaattttgtgcgatttgctgtcaaggtgtttactcgatacacgtttggataagcctctatctcttgaatctcgatttgagttggccagttatggctaagaaagggttctcaagtttccatagaaaagcagtctcttcccaagatacgcttgaatcgatagagcttgtctctagcgctaattgtctagaaagtgttacgtatcaagatatatcagcatttcccgaaacaattgcggtagagattaatttccgattaagcattcttcgctttttagcgcgaaagtgcgaaaccattgtggccaaatcaattgaaccacatcgtgtagagctacagcaaaactatagtagaaaaatacccagtgcaataacgatatatcgatggtggcttgcttttcgaaaatcagactacaaccccattagcttagcacctaatatcaaggatagaggtaatagagagacaaaagtgtcaacagttgttgattctattatggaacaggcagttgaaagagttatatctggacgaaaagtcaatgttagctctgcatataaacgtgttcgacgaaaagttcgtcaatacaatctaactcatggaacgaaatacacgtatcctaagtacgaatctgtaagaaagcgagtaaaaaagaaaaccccatttgagttattagccgcagggaaaggggagagagtagctaagagagagtttcgccgaatgggaaaaaagatcctcacgtctagcgtgctagagagggttgaaatagatcacactgtcgttgacctttttgcagtacacgaagagtatcgaatcccattgggccgaccttggcttactcaattggttgattgttacagtaaagctgtaatcggtttttatttaggtttcgagcctcctagctatgtgtcggtttcccttgcacttaagaatgcaatacaacgcaaagatgacttaatctcctcgtatgaatcgatcgagaatgaatggctatgttatggcatcccagacctactcgtaactgataatggtaaagagtttttgtcgaaagcatttgatcaagcatgtgaatcactattgatcaatgtgcatcaaaataaagttgagacgcccgacaacaaacctcatgttgaacgtaactacgggactattaatacttctctgttagacgatttacctgggaaatccttcagccagtaccttcaaagagaagggtacgactctgtgggagaagctacccttacactcaatgagattagagaaatttacttaatttggttggtggatatttatcataaaaaacccaatcagagaggcactaattgtcctaatgttgcgtggaaaaagggttgtcaagaatgggaaccagaggagttctctggttctaaagacgaattagactttaaatttgctattgttgattacaaacaacttactaaagtagggataactgtctacaaagaactgagttatagcaatgaccgtttagctgaatatagagggaagaaaggaaaccataaagttcagttcaagtataaccctgagtgtatggcagttatttgggtgttggatgaggatatgaatgagtactttacagttaatgcgattgactacgaatatgcaagtagagtatcactttggcaacataaatataacatgaaatatcaagcagaactaaattcagcagaatatgatgaggacaaggaaattgatgcagaaataaaaattgaagaaatcgcagatcgttcaattgttaagactaacaaaatcagagctcggaggcgtggcgctaggcatcaagagaatagcgcaagggctaagtcaatcagtaatgcgaacccggcctcgatacaaaaacatgaagatgaaatcgttagtgcagataatgacgattgggatattgattatgtctgagaaatcgtcaaatgagtgaaacgcgtgaggctcgtatatcaagagctaaaagggcatttgtatccacaccgagcgttaggaaaatcttgagttacatggatagatgtagagatctatcagacctagagtctgagcctacatgcatgatggtctatggtgcttcgggtgtaggtaaaacgaccgtcatcaagaaatacttaaatcaaaacagaagagagtccgaagccgggggcgatataataccggttttgcatattgagttgccagacaatgcgaagccagtagatgcagcaagggaattgctggttgaaatgggtgacccgctagcactttatgaaactgacttagctagattgacgaaaagactgactgaattaatccctgcggtcggcgtgaagctgattattatcgatgagttccaacatttggtggaagaaaggtcaaatcgggttcttacccaagtaggtaattggctaaaaatgatacttaacaaaacgaaatgtccaattgttatatttggtatgccatactcaaaagttgtactgcaagcaaactcgcaacttcacgggcgattttccattcaggttgaactgcgcccctttagctaccagggaggtagaggtgtatttaaaacttttttggaataccttgataaagccctaccttttgaaaaacaggctggcttagccaacgaaagtttgcagaaaaaattgtatgcattctctcagggaaacatgcgttcgttgagaaaccttatttatcaagcatctatcgaagcaattgataatcagcatgagacgataaccgaagaagatttcgtttttgcatcgaagttgacatcgggcgataaacccaactcatggaaaaatccttttgaggagggtgttgaggtaacagaagatatgttacgaccgccaccaaaagatattggttgggaggactatttgagacattcaaccccgagagtgagtaaaccaggtagaaataaaaactttttcgaataacctaggctgctgcgctgctgccaccgctgagcaataactagcataaccccttggggcctctaaacgggtcttgaggggttttttgctgaaacctcaggcattgaacctgcacggtaccgagctcgaattcactggccgtcgttttacaacgtcgtgactgggaaaaccctggcgttacccaacttaatcgccttgctatcgtggccggatcttgcggcccctcggcttgaacgaattgttagacattatttgccgactaccttggtgatctcgcctttcacgtagtggacaaattcttccaactgatctgcgcgcgaggccaagcgatcttcttcttgtccaagataagcctgtctagcttcaagtatgacgggctgatactgggccggcaggcgctccattgcccagtcggcagcgacatccttcggcgcgattttgccggttactgcgctgtaccaaatgcgggacaacgtaagcactacatttcgctcatcgccagcccagtcgggcggcgagttccatagcgttaaggtttcatttagcgcctcaaatagatcctgttcaggaaccggatcaaagagttcctccgccgctggacctaccaaggcaacgctatgttctcttgcttttgtcagcaagatagccagatcaatgtcgatcgtggctggctcgaagatacctgcaagaatgtcattgcgctgccattctccaaattgcagttcgcgcttagctggataacgccacggaatgatgtcgtcgtgcacaacaatggtgacttctacagcgcggagaatctcgctctctccaggggaagccgaagtttccaaaaggtcgttgatcaaagctcgccgcgttgtttcatcaagccttacggtcaccgtaaccagcaaatcaatatcactgtgtggcttcaggccgccatccactgcggagccgtacaaatgtacggccagcaacgtcggttcgagatggcgctcgatgacgccaactacctctgatagttgagtcgatacttcggcgatcaccgcttccctcatactcttcctttttcaatattattgaagcatttatcagggttattgtctcatgagcggatacatatttgaatgtatttagaaaaataaacaaa

SEQ ID NO: 11 - DNA, 6959 bp, synthetic construct
  source 1..6959: mol_type = other DNA
gagttatacacagggctgggatctattctttttatctttttttattctttctttattctataaattataaccacttgaatataaacaaaaaaaacacacaaaggtctagcggaatttacagagggtctagcagaatttacaagttttccagcaaaggtctagcagaatttacagatacccacaactcaaaggaaaaggactagtaattatcattgactagcccatctcaattggtatagtgattaaaatcacctagaccaattgagatgtatgtctgaattagttgttttcaaagcaaatgaactagcgattagtcgctatgacttaacggagcatgaaaccaagctaattttatgctgtgtggcactactcaaccccacgattgaaaaccctacaaggaaagaacggacggtatcgttcacttataaccaatacgctcagatgatgaacatcagtagggaaaatgcttatggtgtattagctaaagcaaccagagagctgatgacgagaactgtggaaatcaggaatcctttggttaaaggctttgagattttccagtggacaaactatgccaagttctcaagcgaaaaattagaattagtttttagtgaagagatattgccttatcttttccagttaaaaaaattcataaaatataatctggaacatgttaagtcttttgaaaacaaatactctatgaggatttatgagtggttattaaaagaactaacacaaaagaaaactcacaaggcaaatatagagattagccttgatgaatttaagttcatgttaatgcttgaaaataactaccatgagtttaaaaggcttaaccaatgggttttgaaaccaataagtaaagatttaaacacttacagcaatatgaaattggtggttgataagcgaggccgcccgactgatacgttgattttccaagttgaactagatagacaaatggatctcgtaaccgaacttgagaacaaccagataaaaatgaatggtgacaaaataccaacaaccattacatcagattcctacctacataacggactaagaaaaacactacacgatgctttaactgcaaaaattcagctcaccagttttgaggcaaaatttttgagtgacatgcaaagtaagtatgatctcaatggttcgttctcatggctcacgcaaaaacaacgaaccacactagagaacatactggctaaatacggaaggatctgaggttcttatggctcttgtatctatcagtgaagcatcaagactaacaaacaaaagtagaacaactgttcaccgttacatatcaaagggaaaactgtccatatgcacagatgaaaacggtgtaaaaaagatagatacatcagagcttttacgagtttttggtgcattcaaagctgttcaccatgaacagatcgacaatgtaacagatgaacagcatgtaacacctaatagaacaggtgaaaccagtaaaacaaagcaactagaacatgaaattgaacacctgagacaacttgttacagctcaacagtcacacatagacagcctgaaacaggcgatgctgcttatcgaatcaaagctgccgacaacacgggagccagtgacgcctcccgtggggaaaaaatcatggcaattctggaagaaatagcgctttcagccggcaaaccggctgaagccggatctgcgattctgataacaaactagcaacaccagaacagcccgtttgcgggcagcaaaacccgtaccctaggtctagggcggcggaattcgcggccgcttctagagtttacggctagctcagtcctaggtacaatgctagctactagagaaagaggagaaatactagatgagtgtgatcgctaaacaaatgacctacaaggtttatatgtcaggcacggtcaatggacactactttgaggtcgaaggcgatggaaaaggtaagccctacgagggggagcagacggtaaagctcactgtcaccaagggcggacctctgccatttgcttgggatattttatcaccacagtgtcagtacggaagcataccattcaccaagtaccctgaagacatccctgactatgtaaagcagtcattcccggagggctatacatgggagaggatcatgaactttgaagatggtgcagtgtgtactgtcagcaatgattccagcatccaaggcaactgtttcatctaccatgtcaagttctctggtttgaactttcctcccaatggacctgtcatgcagaagaagacacagggctgggaacccaacactgagcgtctctttgcacgagatggaatgctgctaggaaacaactttatggctctgaagttagaaggaggcggtcactatttgtgtgaatttaaaactacttacaaggcaaagaagcctgtgaagatgccagggtatcactatgttgaccgcaaactggatgtaaccaatcacaacaaggattacacttcggttgagcagtgtgaaatttccattgcacgcaaacctgtggtcgcctaataatactagtagcggccgctgcagtccggcaaaaaagggcaaggtgtcaccaccctgccctttttctttaaaaccgaaaagatactaggagcacgtgttgacaattaatcatcggcatagtatatcggcatagtataatacgacaaggtgaggaactaaaccatgaacatcaaaaagtttgcaaaacaagcaacagtattaacctttactaccgcactgctggcaggaggcgcaactcaagcgtttgcgaaagaaacgaaccaaaagccatataaggaaacatacggcatttcccatattacacgccatgatatgctgcaaatccctgaacagcaaaaaaatgaaaaatataaagttcctgagttcgattcgtccacaattaaaaatatctcttctgcaaaaggcctggacgtttgggacagctggccattacaaaacactgacggcactgtcgcaaactatcacggctaccacatcgtctttgcattagccggagatcctaaaaatgcggatgacacatcgatttacatgttctatcaaaaagtcggcgaaacttctattgacagctggaaaaacgctggccgcgtctttaaagacagcgacaaattcgatgcaaatgattctatcctaaaagaccaaacacaagaatggtcaggttcagccacatttacatctgacggaaaaatccgtttattctacactgatttctccggtaaacattacggcaaacaaacactgacaactgcacaagttaacgtatcagcatcagacagctctttgaacatcaacggtgtagaggattataaatcaatctttgacggtgacggaaaaacgtatcaaaatgtacagcagttcatcgatgaaggcaactacagctcaggcgacaaccatacgctgagagatcctcactacgtagaagataaaggccacaaatacttagtatttgaagcaaacactggaactgaagatggctaccaaggcgaagaatctttatttaacaaagcatactatggcaaaagcacatcattcttccgtcaagaaagtcaaaaacttctgcaaagcgataaaaaacgcacggctgagttagcaaacggcgctctcggtatgattgagctaaacgatgattacacactgaaaaaagtgatgaaaccgctgattgcatctaacacagtaacagatgaaattgaacgcgcgaacgtctttaaaatgaacggcaaatggtacctgttcactgactcccgcggatcaaaaatgacgattgacggcattacgtctaacgatatttacatgcttggttatgtttctaattctttaactggcccatacaagccgctgaacaaaactggccttgtgttaaaaatggatcttgatcctaacgatgtaacctttacttactcacacttcgctgtacctcaagcgaaaggaaacaatgtcgtgattacaagctatatgacaaacagaggattctacgcagacaaacaatcaacgtttgcgcctagcttcctgctgaacatcaaaggcaagaaaacatctgttgtcaaagacagcatccttgaacaaggacaattaacagttaacaaataaggaggacaatcatggagaaaaaaatcactggatataccaccgttgatatatcccaatggcatcgtaaagaacattttgaggcatttcagtcagttgctcaatgtacctataaccagaccgttcagctggatattacggcctttttaaagaccgtaaagaaaaataagcacaagttttatccggcctttattcacattcttgcccgcctgatgaatgctcatccggaattccgtatggcaatgaaagacggtgagctggtgatatgggatagtgttcacccttgttacaccgttttccatgagcaaactgaaacgttttcatcgctctggagtgaataccacgacgatttccggcagtttctacacatatattcgcaagatgtggcgtgttacggtgaaaacctggcctatttccctaaagggtttattgagaatatgtttttcgtctcagccaatccctgggtgagtttcaccagttttgatttaaacgtggccaatatggacaacttcttcgcccccgttttcaccgtgggcaaatattatacgcaaggcgacaaggtgctgatgccgctggcgattcaggttcatcatgccgtctgtgatggcttccatgtcggcagaatgcttaatgaattacaacagtactgcgatgagtggcagggcggggcgtaatcgcgatatcagcacacaattgcccattatacgcgcgtataatggactattgtgtgctgataggatcctcatctgttacgccggcggtagccggccagcctcgcagagcaggattcccgttgagcaccgccaggtgcgaataagggacagtgaagaaggaacacccgctcgcgggtgggcctacttcacctatcctgcccggctgacgccgttggatacaccaaggaaagtctacacgaaccctttggcaaaatcctgtatatcgtgcgaaaaaggatggatataccgaaaaaatcgctataatgaccccgaagcagggttatgcagcggaaaagcgctctttgttgatacaaccataaaatgataattacacccataaattgataattatcacacccataaattgatattgcctcttcatggtctaaacttcagtaagtttacgacattttcctcgaggtcatttccggggatccgcgatcgcttctccttacgcatctgtgcggtatttcattgacaggcacatttcgtaagctgtaatgcaagtagcgtaactgccgtcacgcaactggtccacaaccttgaccgaacgcagcggtggtaacggcgcagtggcggttttcatggcttcttgttatgacatgtttttttggggtacagtctatgcctcgggcatccaagcagcaagcgcgttacgccgtgggtcgatgtttgatgttatggagcagcaacgatgttacgcagcagggcagtcgccctaaaacaaagttaaacatcatgagggaagcggtgatcgccgaagtatcgactcaactatcagaggtagttggcgtcatcgagcgccatctcgaaccgacgttgctggccgtacatttgtacggctccgcagtggatggcggcctgaagccacacagtgatattgatttgctggttacggtgaccgtaaggcttgatgaaacaacgcggcgagctttgatcaacgaccttttggaaacttcggcttcccctggagagagcgagattctccgcgctgtagaagtcaccattgttgtgcacgacgacatcattccgtggcgttatccagctaagcgcgaactgcaatttggagaatggcagcgcaatgacattcttgcaggtatcttcgagccagccacgtacgacattgatctggctatcttgctgacaaaagcaagagaacatagcgttgccttggtaggtccagcggcggaggaactctttgatccggttcctgaacaggatctatttgaggcgctaaatgaaaccttaacgctatggaactcgccgcccgactgggctggcgatgagcgaaatgtagtgcttacgttgtcccgcatttggtacagcgcagtaaccggcaaaatcgcgccgaaggatgtcgctgccgactgggcaatggagcgcctgccggcccagtatcagcccgtcatacttgaagctagacaggcttatcttggacaagaagaagatcgcttggcctcgcgcgcagatcagttggaagaatttgtccactacgtgaaaggcgagatcaccaaggtagtcggcaaataatgtctaacaattcgttcaagccgacggatatcgagctcgcttggactcctgttgatagatccagtaatgacctcagaactccatctggatttgttcagaacgctcggttgccgccgggcgttttttattggtgagaatccaagcactagggacagtaagacgggtaagcctgttgatgataccgctgccttactgggtgcattagccagtctgaatgacctgtcacgggataatccgaagtggtcagactggaaaatcagagggcaggaactgctgaacagcaaaaagtcagatagcaccacatagcagacccgccataaaacgccctgagaagcccgtgacgggcttttcttgtattatgggtagtttccttgcatgaatccataaaaggcgcctgtagtgccatttacccccattcactgccagagccgtgagcgcagcgaactgaatgtcacgaaaaagacagcgactcaggtgcctgatggtcggagacaaaaggaatattcagcgatttgcccgagcttgcgagggtgctacttaagcctttagggttttaaggtctgttttgtagaggagcaaacagcgtttgcgacatccttttgtaatactgcggaactgactaaagtagt

SEQ ID NO: 12 - DNA, 7930 bp, synthetic construct
  source 1..7930: mol_type = other DNA
gagttatacacagggctgggatctattctttttatctttttttattctttctttattctataaattataaccacttgaatataaacaaaaaaaacacacaaaggtctagcggaatttacagagggtctagcagaatttacaagttttccagcaaaggtctagcagaatttacagatacccacaactcaaaggaaaaggactagtaattatcattgactagcccatctcaattggtatagtgattaaaatcacctagaccaattgagatgtatgtctgaattagttgttttcaaagcaaatgaactagcgattagtcgctatgacttaacggagcatgaaaccaagctaattttatgctgtgtggcactactcaaccccacgattgaaaaccctacaaggaaagaacggacggtatcgttcacttataaccaatacgctcagatgatgaacatcagtagggaaaatgcttatggtgtattagctaaagcaaccagagagctgatgacgagaactgtggaaatcaggaatcctttggttaaaggctttgagattttccagtggacaaactatgccaagttctcaagcgaaaaattagaattagtttttagtgaagagatattgccttatcttttccagttaaaaaaattcataaaatataatctggaacatgttaagtcttttgaaaacaaatactctatgaggatttatgagtggttattaaaagaactaacacaaaagaaaactcacaaggcaaatatagagattagccttgatgaatttaagttcatgttaatgcttgaaaataactaccatgagtttaaaaggcttaaccaatgggttttgaaaccaataagtaaagatttaaacacttacagcaatatgaaattggtggttgataagcgaggccgcccgactgatacgttgattttccaagttgaactagatagacaaatggatctcgtaaccgaacttgagaacaaccagataaaaatgaatggtgacaaaataccaacaaccattacatcagattcctacctacataacggactaagaaaaacactacacgatgctttaactgcaaaaattcagctcaccagttttgaggcaaaatttttgagtgacatgcaaagtaagtatgatctcaatggttcgttctcatggctcacgcaaaaacaacgaaccacactagagaacatactggctaaatacggaaggatctgaggttcttatggctcttgtatctatcagtgaagcatcaagactaacaaacaaaagtagaacaactgttcaccgttacatatcaaagggaaaactgtccatatgcacagatgaaaacggtgtaaaaaagatagatacatcagagcttttacgagtttttggtgcattcaaagctgttcaccatgaacagatcgacaatgtaacagatgaacagcatgtaacacctaatagaacaggtgaaaccagtaaaacaaagcaactagaacatgaaattgaacacctgagacaacttgttacagctcaacagtcacacatagacagcctgaaacaggcgatgctgcttatcgaatcaaagctgccgacaacacgggagccagtgacgcctcccgtggggaaaaaatcatggcaattctggaagaaatagcgctttcagccggcaaaccggctgaagccggatctgcgattctgataacaaactagcaacaccagaacagcccgtttgcgggcagcaaaacccgtaccctaggtctagggcggcggaattcgcggccgcttctagagtttacggctagctcagtcctaggtacaatgctagctactagagaaagaggagaaatactagatgagtgtgatcgctaaacaaatgacctacaaggtttatatgtcaggcacggtcaatggacactactttgaggtcgaaggcgatggaaaaggtaagccctacgagggggagcagacggtaaagctcactgtcaccaagggcggacctctgccatttgcttgggatattttatcaccacagtgtcagtacggaagcataccattcaccaagtaccctgaagacatccctgactatgtaaagcagtcattcccggagggctatacatgggagaggatcatgaactttgaagatggtgcagtgtgtactgtcagcaatgattccagcatccaaggcaactgtttcatctaccatgtcaagttctctggtttgaactttcctcccaatggacctgtcatgcagaagaagacacagggctgggaacccaacactgagcgtctctttgcacgagatggaatgctgctaggaaacaactttatggctctgaagttagaaggaggcggtcactatttgtgtgaatttaaaactacttacaaggcaaagaagcctgtgaagatgccagggtatcactatgttgaccgcaaactggatgtaaccaatcacaacaaggattacacttcggttgagcagtgtgaaatttccattgcacgcaaacctgtggtcgcctaataatactagtagcggccgctgcagtccggcaaaaaagggcaaggtgtcaccaccctgccctttttctttaaaaccgaaaagattcgcgagccccaactggggtaacctttgagttctctcagttgggggagcacgtgttgacaattaatcatcggcatagtatatcggcatagtataatacgacaaggtgaggaactaaaccatgtcacatctcgcagaactggttgccagtgcgaaggcggccattagccaggcgtcagatgttgccgcgttagataatgtgcgcgtcgaatatttgggtaaaaaagggcacttaacccttcagatgacgaccctgcgtgagctgccgccagaagagcgtccggcagctggtgcggttatcaacgaagcgaaagagcaggttcagcaggcgctgaatgcgcgtaaagcggaactggaaagcgctgcactgaatgcgcgtctggcggcggaaacgattgatgtctctctgccaggtcgtcgcattgaaaacggcggtctgcatccggttacccgtaccatcgaccgtatcgaaagtttcttcggtgagcttggctttaccgtggcaaccgggccggaaatcgaagacgattatcataacttcgatgctctgaacattcctggtcaccacccggcgcgcgctgaccacgacactttctggtttgacactacccgcctgctgcgtacccagacctctggcgtacagatccgcaccatgaaagcccagcagccaccgattcgtatcatcgcgcctggccgtgtttatcgtaacgactacgaccagactcacacgccgatgttccatcagatggaaggtctgattgttgataccaacatcagctttaccaacctgaaaggcacgctgcacgacttcctgcgtaacttctttgaggaagatttgcagattcgcttccgtccttcctacttcccgtttgccgaaccttctgcagaagtggacgtcatgggtaaaaacggtaaatggctggaagtgctgggctgcgggatggtgcatccgaacgtgttgcgtaacgttggcatcgacccggaagtttactctggtttcggcttcgggatggggatggagcgtctgactatgttgcgttacggcgtcaccgacctgcgttcattcttcgaaaacgatctgcgtttcctcaaacagtttaaataaggaggacaatcatgaaaaagcctgaactcaccgcgacgtctgtcgagaagtttctgatcgaaaagttcgacagcgtctccgacctgatgcagctctcggagggcgaagaatctcgtgctttcagcttcgatgtaggagggcgtggatatgtcctgcgggtaaatagctgcgccgatggtttctacaaagatcgttatgtttatcggcactttgcatcggccgcgctcccgattccggaagtgcttgacattggggaattcagcgagagcctgacctattgcatctcccgccgtgcacagggtgtcacgttgcaagacctgcctgaaaccgaactgcccgctgttctgcagccggtcgcggaggccatggatgcgatcgctgcggccgatcttagccagacgagcgggttcggcccattcggaccgcaaggaatcggtcaatacactacatggcgtgatttcatatgcgcgattgctgatccccatgtgtatcactggcaaactgtgatggacgacaccgtcagtgcgtccgtcgcgcaggctctcgatgagctgatgctttgggccgaggactgccccgaagtccggcacctcgtgcacgcggatttcggctccaacaatgtcctgacggacaatggccgcataacagcggtcattgactggagcgaggcgatgttcggggattcccaatacgaggtcgccaacatcttcttctggaggccgtggttggcttgtatggagcagcagacgcgctacttcgagcggaggcatccggagcttgcaggatcgccgcggctccgggcgtatatgctccgcattggtcttgaccaactctatcagagcttggttgacggcaatttcgatgatgcagcttgggcgcagggtcgatgcgacgcaatcgtccgatccggagccgggactgtcgggcgtacacaaatcgcccgcagaagcgcggccgtctggaccgatggctgtgtagaagtacttgccgatagtggaaaccgacgccccagcactcgtccgagggcaaaggaataacctaggctcgagtaatggtttcttagacgtcttgacagctagctcagtcctaggtataatgctagcctgtcaccggatgtgctttccggtctgatgagtccgtgaggacgaaacagcctctacaaataattttgtttaatactagagaaagaggggaaatactagatggtgtcgaaaggtgaggagcttttcacgggggtggttccaatcttagtcgagcttgatggtgacgtgaatggccataagtttagcgtgcgcggcgagggtgagggcgatgcgacgaacggtaaacttactttaaagtttatttgtactacaggcaaattaccggtcccgtggccgaccctggtcactacgcttgggtatggggtagcatgttttgcccgttaccctgaccacatgaaacagcacgatttctttaaatctgccatgcccgaagggtatgttcaggagcgcactatcagttttaaagacgacggaacgtacaaaactcgtgctgaagtaaagttcgaaggtgatacccttgtgaaccgtatcgtccttaaaggcatcgacttcaaagaggacggtaacattttaggccacaaattagagtacaacttcaattcacataaggtttatatcacagcagataagcaaaaaaatggcatcaaggcaaattttaagacccgccacaacgtagaagatggtggagtccagttggcggaccactaccagcaaaatacaccgattggcgatggtccggttttgcttcccgacaatcactatcttagccaccagagtaaactgagtaaggacccaaatgaaaagcgcgaccacatggtattgaaagagcgcgttacagcagctggaattacacacgatatggacgaactttataagtaatagggataacagggtaatcgcaaaaaaccccgcttcggcggggttttttcgcgtttaaacgtgccagggcgtgcccttgggctccccgggcgcgttttttacgcgttctagagtccttactgcagtagttttgctgaaatactcgattcacaaaaatatcaacttatggttgttttgtgagatatcaatatatggttgttttgtggttaagttgctgattataaataattattaaatatcactttatggttgcatcaacaggtaccgagctctcatctgttacgctcggcgtgtagccggccagcctcgcagagcaggattcccgttgagcaccgccaggtgcgaataagggacagtgaagaaggaacacccgctcgcgggtgggcctacttcacctatcctgcccggctgatcgccgttggatacaccaaggaaagtctacacgaaccctttggcaaaatcctgtatatcgtgcgaaaaaggatggatataccgaaaaaatcgctataatgaccccgaagcagggttatgcagcggaaaagcgcttatcagcacacaattgcccattatacgcgcgtataatggactattgtgtgctgatattctccttacgcatctgtgcggtatttcattgacaggcacatttcgtaagctgtaatgcaagtagcgtaactgccgtcacgcaactggtccacaaccttgaccgaacgcagcggtggtaacggcgcagtggcggttttcatggcttcttgttatgacatgtttttttggggtacagtctatgcctcgggcatccaagcagcaagcgcgttacgccgtgggtcgatgtttgatgttatggagcagcaacgatgttacgcagcagggcagtcgccctaaaacaaagttaaacatcatgagggaagcggtgatcgccgaagtatcgactcaactatcagaggtagttggcgtcatcgagcgccatctcgaaccgacgttgctggccgtacatttgtacggctccgcagtggatggcggcctgaagccacacagtgatattgatttgctggttacggtgaccgtaaggcttgatgaaacaacgcggcgagctttgatcaacgaccttttggaaacttcggcttcccctggagagagcgagattctccgcgctgtagaagtcaccattgttgtgcacgacgacatcattccgtggcgttatccagctaagcgcgaactgcaatttggagaatggcagcgcaatgacattcttgcaggtatcttcgagccagccacgtacgacattgatctggctatcttgctgacaaaagcaagagaacatagcgttgccttggtaggtccagcggcggaggaactctttgatccggttcctgaacaggatctatttgaggcgctaaatgaaaccttaacgctatggaactcgccgcccgactgggctggcgatgagcgaaatgtagtgcttacgttgtcccgcatttggtacagcgcagtaaccggcaaaatcgcgccgaaggatgtcgctgccgactgggcaatggagcgcctgccggcccagtatcagcccgtcatacttgaagctagacaggcttatcttggacaagaagaagatcgcttggcctcgcgcgcagatcagttggaagaatttgtccactacgtgaaaggcgagatcaccaaggtagtcggcaaataatgtctaacaattcgttcaagccgacggatatcgagctcgcttggactcctgttgatagatccagtaatgacctcagaactccatctggatttgttcagaacgctcggttgccgccgggcgttttttattggtgagaatccaagcactagggacagtaagacgggtaagcctgttgatgataccgctgccttactgggtgcattagccagtctgaatgacctgtcacgggataatccgaagtggtcagactggaaaatcagagggcaggaactgctgaacagcaaaaagtcagatagcaccacatagcagacccgccataaaacgccctgagaagcccgtgacgggcttttcttgtattatgggtagtttccttgcatgaatccataaaaggcgcctgtagtgccatttacccccattcactgccagagccgtgagcgcagcgaactgaatgtcacgaaaaagacagcgactcaggtgcctgatggtcggagacaaaaggaatattcagcgatttgcccgagcttgcgagggtgctacttaagcctttagggttttaaggtctgttttgtagaggagcaaacagcgtttgcgacatccttttgtaatactgcggaactgactaaagtagt

SEQ ID NO: 13 - DNA, 11912 bp, synthetic construct
  source 1..11912: mol_type = other DNA
ttttctactgaaccgctctagatttcagtgcaatttatctcttcaaatgtagcacctgaagtcagccccatacgatataagttgtaattctcatgttagtcatgccccgcgcccaccggaaggagctgactgggttgaaggctctcaagggcatcggtcgcacgcttgtgttgacagctagctcagtcctaggtataatactagtcacgtgaactgccgagtaggtagctgataacgttgtctgacacttgtcacaaaccgctaggaggtgaactgccgagtaggtagctgataactcgagagatccggctgctaacaaacccgcttaaggaagatggccaacttatttacataaggctgctgccaccgctgagcaataactagcataaccccttggggcctctaaacgggtcttgaggggttttttggtttaaacccatctaattgggaattccccctgcctcgcgcgtttcggtgatgacggtgaaaacctctgacacagcgatcgcttatgacaacttgacggctacatcattcactttttcttcacaaccggcacggaactcgctcgggctggccccggtgcattttttaaatacccgcgagaaatagagttgatcgtcaaaaccaacattgcgaccgacggtggcgataggcatccgggtggtgctcaaaagcagcttcgcctggctgatacgttggtcctcgcgccagcttaagacgctaatccctaactgctggcggaaaagatgtgacagacgcgacggcgacaagcaaacatgctgtgcgacgctggcgatatcaaaattgctgtctgccaggtgatcgctgatgtactgacaagcctcgcgtacccgattatccatcggtggatggagcgactcgttaatcgcttccatgcgccgcagtaacaattgctcaagcagatttatcgccagcagctccgaatagcgcccttccccttgcccggcgttaatgatttgcccaaacaggtcgctgaaatgcggctggtgcgcttcatccgggcgaaagaaccccgtattggcaaatattgacggccagttaagccattcatgccagtaggcgcgcggacgaaagtaaacccactggtgataccattcgcgagcctccggatgacgaccgtagtgatgaatctctcctggcgggaacagcaaaatatcacccggtcggcaaacaaattctcgtccctgatttttcaccaccccctgaccgcgaatggtgagattgagaatataacctttcattcccagcggtcggtcgataaaaaaatcgagataaccgttggcctcaatcggcgttaaacccgccaccagatgggcattaaacgagtatcccggcagcaggggatcattttgcgcttcagccatacttttcatactcccgccattcagagaagaaaccaattgtccatattgcatcagacattgccgtcactgcgtcttttactggctcttctcgctaaccaaaccggtaaccccgcttattaaaagcattctgtaacaaagcgggaccaaagccatgacaaaaacgcgtaacaaaagtgtctataatcacggcagaaaagtccacattgattatttgcacggcgtcacactttgctatgccatagcatttttatccataagattagcggatcctacctgacgctttttatcgcaactctctactgtttctccatacccgggatccgaattcgagcgaaggagatatacatatgtttttgcaaagacctaaaccttacagcgatgaaagtttagaaagtttctttatccgagtggctaacaaaaatggctacggtgatgtccatcgcttcctagaagccactaaacgattccttcaagacattgaccataatggctatcaaacctttccgactgatataactcggataaacccatactcagctaaaaacagttccagcgcacgaactgcgtcattcctgaaacttgcacaattgacatttaatgaaccgccagagctacttgggttggcaattaacagaacaaacatgaaatactcgccgtcaactagcgcggttgttagaggtgcagaagtctttcctcgcagtttactacggacgcactccatcccctgctgtcctttgtgtctgcgagaaaatggctacgcctcctacctttggcactttcaggggtacgaatactgccacagccataacgtacctttaattaccacttgtagctgtggtaaggagtttgactaccgagtatctgggttaaagggcatttgctgcaaatgcaaggagcctatcaccttaaccagcagggagaacggtcatgaggcagcgtgtactgtttcaaactggcttgctggccatgaatctaaacctctgccaaatcttcctaaaagctaccgatggggtttagttcattggtggatgggtattaaagatagcgagttcgatcacttttcgttcgttcaatttttctcaaactggccaaggtcattccactcgataatcgaagatgaagtagagttcaaccttgagcatgctgttgtcagcacgtctgaattacgactaaaagatcttcttggtcgattgtttttcggttcaattcggttacctgagcggaatcttcaacacaatatcatccttggtgagcttctctgctatttagaaaatcgtttatggcaagacaagggattaatcgccaacctcaaaatgaacgcgttagaggcgactgtaatgttaaattgtagcctcgatcagattgcatcaatggttgaacaacgcatcttgaagccaaatcgaaaaagcaagcccaacagccctcttgatgttaccgattatctatttcatttcggcgatattttctgtctttggttagctgagttccaaagcgatgagtttaaccgttcgttttatgtgtcgaggtggtaaatgcaaactctgaaagaactaatcgcatccaatcctgacgacttaacaactgaacttaagagagcatttcgtccactcacaccgcatattgcaattgatggtaatgaacttgacgcactgacgatattagtcaatttaaccgataagactgatgatcagaaagacctgctcgatcgagccaaatgcaagcaaaaacttcgagatgaaaaatggtgggctagctgcataaattgcgttaattacagacaaagccataacccaaaattcccggatatacgttctgaaggcgtgattcgaacccaagccctgggtgaattaccgagtttcctactctcgtcctcaaaaatcccaccataccattggtcatatagccatgattcaaaatacgtcaacaaaagcgcattcctcaccaatgagttttgttgggatggtgagatctcatgtttgggtgagcttcttaaagatgcagatcacccactttggaatactttgaaaaagttaggttgttctcaaaaaacttgcaaagcaatggcaaaacaactagctgatattactctcacgactatcaatgtcacactcgcaccaaattacctgactcaaatatctctccccgatagtgatacatcctacatttcactctctcctgttgcatcgctatcgatgcaaagccactttcatcagaggctccaagatgaaaatcggcatagcgcgataacgcggtttagccgaactaccaacatgggggtcactgcgatgacatgtggcggcgcatttagaatgttaaagtctggcgctaagttttccagcccccctcatcaccgattaaacagtaaacgaagttggttgacgtcagagcatgttcagtcattaaaacagtaccagcgcctcaacaaaagcctcatacctgaaaactctcggattgcactccgtagaaaatacaaaatcgagcttcaaaatatggtcagatcttggtttgcaatgcaagaccatacccttgattcgaacatacttatccaacatttgaatcatgacctatcttacttaggagccacaaaacgttttgcatacgatccagcgatgaccaagctctttactgagcttttgaaacgagagttatcaaattcaatcaataatggtgagcaacacactaatggatcgtttttagtcctaccgaatatcagggtttgtggcgcaacagctttaagctccccggtaacggtggggattccatcacttacagctttctttggcttcgttcacgcatttgaacggaatataaatcgcaccacctcatcgtttcgtgttgaatcctttgcgatatgcgtccatcaactacatgtcgagaagcgaggtttgacagcagagtttgtggaaaaaggcgacgggactatatccgctcccgcgacccgggatgactggcagtgtgatgtcgtatttagccttattttgaacaccaactttgctcaacatattgaccaagatacgttagttacatcactaccaaagcgattggctcggggttcagcaaaaattgcgattgatgactttaaacatatcaactcattctcgacattagaaacagcgatcgaatctctgccaatagaagctggtaggtggttatcactttacgcacagtcaaacaataatctaagtgatctattagcagccatgacagaggaccatcagctcatggcaagctgcgtcggttaccacttgttagaagagcccaaagataaaccaaactccctcagaggttacaaacacgctatcgccgagtgcatcattggactcattaactcaatcacctttagctcagagactgatcccaacacaatcttttggtcgctaaagaactatcaaaactacctagtggtacagccaaggagtatcaacgatgaaactaccgacaaatctagcctatgagcgctctatcgacccatcagatgtctgtttttttgtcgtctggcccgatgatagaaaaacacctttaacctacaattctcgtactctgctcgggcaaatggaagcggcatcattagcctatgatgtctcaggtcaaccaataaaaagtgccaccgctgaggcgttagctcaagggaaccctcatcaagttgatttctgccacgttccatacggtgcgagtcatattgaatgcagtttctccgtctcgttttcttctgaactacgtcaaccatataagtgtaactcaagcaaagttaaacaaacgctagtgcaattagtcgagctctacgaaacgaaaatcggctggactgagctagcaacccgatatttgatgaacatttgcaacggtaaatggctgtggaaaaatacccgtaaagcctattgctggaacattgtacttacaccttggccttggaacggggaaaaggttggatttgaagatattcgtactaactacacctcacggcaagactttaaaaataataaaaattggtctgctatagttgaaatgatcaaaaccgcattttctagtactgatgggctggcgatatttgaagtcagggccaccttgcacttgccaacgaatgctatggtgcggccaagccaagttttcacagaaaaagaaagtggcagtaaaagtaaatctaaaactcaaaacagtcgagtttttcagagtacaactattgatggtgaacgatcgccaatactaggggcctttaaaacgggagcagctattgcaaccattgacgactggtatcctgaagccactgagccactaagggtcggacggtttggggttcatcgcgaagatgtcacttgctaccgtcatccgtctaccggaaaagattttttctcgatattacaacaagcagagcactatattgaagtgttgagcgccaacaaaactcccgctcaagaaactatcaacgacatgcactttttaatggctaacctgattaagggtgggatgttccagcataaaggagactgactgtgaaatggtattataagacaatcacctttctgccagagttgtgcaacaacgagtcactggctgcaaagtgtctccgcgttctgcatggatttaactatcagtatgagacacgaaatatcggcgtttcatttccgctttggtgtgatgcaacggttggaaaaaagatttcatttgtcagcaagaacaagatagaactcgacttactacttaaacaacactatttcgtccaaatggaacaacttcaatactttcatatatccaacactgttctcgtcccagaagattgtacatacgtttcctttagacgctgtcaatctatagataagctcacagcagcagggctggcaaggaaaatcagacgcctggagaaacgtgctctatctagaggcgagcaatttgacccatcatcttttgctcaaaaagagcatactgcaatagcgcactaccactcacttggggagtccagcaaacagacgaaccgcaactttcgactcaatatcaggatgctctcggagcaaccccgtgaggggaactcgatttttagtagctatggcttatcaaattcagaaaactcgtttcagcctgtacccttaatctgacctttaataaggagatataccatggcgacaagtttacctacgccctcagcaattacgacttcggcgttagagtatgcattccatactcccgctcgcaatctaacgaaatctcgcggaaaaaacattcatcgttatgtcagtgtaaagatgagtaagaggattacggtagaatctactctagagtgtgatgcctgctatcactttgattttgagccaagtattgttcgcttttgcgctcaaccgattcgatttttatattatctcaatggtcagtctcactcctatgttcctgactttctagttcaatttgataccaacgagtttgttctatatgaagtaaagtcagcttatgctaagaacaaacctgattttgatgttgaatgggaggcgaaagtaaaagcagcaactgaactagggctagaattggagcttgttgaagagagtgatattagggatacggttgtattaaataatcttaagcgcatgcatcgttatgcttcgaaagatgagctgaataacgtacataactctctcttaaaaataataaagtacaatggcgcccaatctgcaagatgcttgggagaacagttgggtttaaaaggccgaactgttttaccaattttgtgcgatttgctgtcaaggtgtttactcgatacacgtttggataagcctctatctcttgaatctcgatttgagttggccagttatggctaagaaagggttctcaagtttccatagaaaagcagtctcttcccaagatacgcttgaatcgatagagcttgtctctagcgctaattgtctagaaagtgttacgtatcaagatatatcagcatttcccgaaacaattgcggtagagattaatttccgattaagcattcttcgctttttagcgcgaaagtgcgaaaccattgtggccaaatcaattgaaccacatcgtgtagagctacagcaaaactatagtagaaaaatacccagtgcaataacgatatatcgatggtggcttgcttttcgaaaatcagactacaaccccattagcttagcacctaatatcaaggatagaggtaatagagagacaaaagtgtcaacagttgttgattctattatggaacaggcagttgaaagagttatatctggacgaaaagtcaatgttagctctgcatataaacgtgttcgacgaaaagttcgtcaatacaatctaactcatggaacgaaatacacgtatcctaagtacgaatctgtaagaaagcgagtaaaaaagaaaaccccatttgagttattagccgcagggaaaggggagagagtagctaagagagagtttcgccgaatgggaaaaaagatcctcacgtctagcgtgctagagagggttgaaatagatcacactgtcgttgacctttttgcagtacacgaagagtatcgaatcccattgggccgaccttggcttactcaattggttgattgttacagtaaagctgtaatcggtttttatttaggtttcgagcctcctagctatgtgtcggtttcccttgcacttaagaatgcaatacaacgcaaagatgacttaatctcctcgtatgaatcgatcgagaatgaatggctatgttatggcatcccagacctactcgtaactgataatggtaaagagtttttgtcgaaagcatttgatcaagcatgtgaatcactattgatcaatgtgcatcaaaataaagttgagacgcccgacaacaaacctcatgttgaacgtaactacgggactattaatacttctctgttagacgatttacctgggaaatccttcagccagtaccttcaaagagaagggtacgactctgtgggagaagctacccttacactcaatgagattagagaaatttacttaatttggttggtggatatttatcataaaaaacccaatcagagaggcactaattgtcctaatgttgcgtggaaaaagggttgtcaagaatgggaaccagaggagttctctggttctaaagacgaattagactttaaatttgctattgttgattacaaacaacttactaaagtagggataactgtctacaaagaactgagttatagcaatgaccgtttagctgaatatagagggaagaaaggaaaccataaagttcagttcaagtataaccctgagtgtatggcagttatttgggtgttggatgaggatatgaatgagtactttacagttaatgcgattgactacgaatatgcaagtagagtatcactttggcaacataaatataacatgaaatatcaagcagaactaaattcagcagaatatgatgaggacaaggaaattgatgcagaaataaaaattgaagaaatcgcagatcgttcaattgttaagactaacaaaatcagagctcggaggcgtggcgctaggcatcaagagaatagcgcaagggctaagtcaatcagtaatgcgaacccggcctcgatacaaaaacatgaagatgaaatcgttagtgcagataatgacgattgggatattgattatgtctgagaaatcgtcaaatgagtgaaacgcgtgaggctcgtatatcaagagctaaaagggcatttgtatccacaccgagcgttaggaaaatcttgagttacatggatagatgtagagatctatcagacctagagtctgagcctacatgcatgatggtctatggtgcttcgggtgtaggtaaaacgaccgtcatcaagaaatacttaaatcaaaacagaagagagtccgaagccgggggcgatataataccggttttgcatattgagttgccagacaatgcgaagccagtagatgcagcaagggaattgctggttgaaatgggtgacccgctagcactttatgaaactgacttagctagattgacgaaaagactgactgaattaatccctgcggtcggcgtgaagctgattattatcgatgagttccaacatttggtggaagaaaggtcaaatcgggttcttacccaagtaggtaattggctaaaaatgatacttaacaaaacgaaatgtccaattgttatatttggtatgccatactcaaaagttgtactgcaagcaaactcgcaacttcacgggcgattttccattcaggttgaactgcgcccctttagctaccagggaggtagaggtgtatttaaaacttttttggaataccttgataaagccctaccttttgaaaaacaggctggcttagccaacgaaagtttgcagaaaaaattgtatgcattctctcagggaaacatgcgttcgttgagaaaccttatttatcaagcatctatcgaagcaattgataatcagcatgagacgataaccgaagaagatttcgtttttgcatcgaagttgacatcgggcgataaacccaactcatggaaaaatccttttgaggagggtgttgaggtaacagaagatatgttacgaccgccaccaaaagatattggttgggaggactatttgagacattcaaccccgagagtgagtaaaccaggtagaaataaaaactttttcgaataacctaggctgctgcgctgctgccaccgctgagcaataactagcataaccccttggggcctctaaacgggtcttgaggggttttttgctgaaacctcaggcattgaacctgcacggtaccgagctcgaattcactggccgtcgttttacaacgtcgtgactgggaaaaccctggcgttacccaacttaatcgccttgctatcgtggccggatcttgcggcccctcggcttgaacgaattgttagacattatttgccgactaccttggtgatctcgcctttcacgtagtggacaaattcttccaactgatctgcgcgcgaggccaagcgatcttcttcttgtccaagataagcctgtctagcttcaagtatgacgggctgatactgggccggcaggcgctccattgcccagtcggcagcgacatccttcggcgcgattttgccggttactgcgctgtaccaaatgcgggacaacgtaagcactacatttcgctcatcgccagcccagtcgggcggcgagttccatagcgttaaggtttcatttagcgcctcaaatagatcctgttcaggaaccggatcaaagagttcctccgccgctggacctaccaaggcaacgctatgttctcttgcttttgtcagcaagatagccagatcaatgtcgatcgtggctggctcgaagatacctgcaagaatgtcattgcgctgccattctccaaattgcagttcgcgcttagctggataacgccacggaatgatgtcgtcgtgcacaacaatggtgacttctacagcgcggagaatctcgctctctccaggggaagccgaagtttccaaaaggtcgttgatcaaagctcgccgcgttgtttcatcaagccttacggtcaccgtaaccagcaaatcaatatcactgtgtggcttcaggccgccatccactgcggagccgtacaaatgtacggccagcaacgtcggttcgagatggcgctcgatgacgccaactacctctgatagttgagtcgatacttcggcgatcaccgcttccctcatactcttcctttttcaatattattgaagcatttatcagggttattgtctcatgagcggatacatatttgaatgtatttagaaaaataaacaaatagctagctcactcggtcgctacgctccgggcgtgagactgcggcgggcgctgcggacacatacaaagttacccacagattccgtggataagcaggggactaacatgtgaggcaaaacagcagggccgcgccggtggcgtttttccataggctccgccctcctgccagagttcacataaacagacgcttttccggtgcatctgtgggagccgtgaggctcaaccatgaatctgacagtacgggcgaaacccgacaggacttaaagatccccaccgtttccggcgggtcgctccctcttgcgctctcctgttccgaccctgccgtttaccggatacctgttccgcctttctcccttacgggaagtgtggcgctttctcatagctcacacactggtatctcggctcggtgtaggtcgttcgctccaagctgggctgtaagcaagaactccccgttcagcccgactgctgcgccttatccggtaactgttcacttgagtccaacccggaaaagcacggtaaaacgccactggcagcagccattggtaactgggagttcgcagaggatttgtttagctaaacacgcggttgctcttgaagtgtgcgccaaagtccggctacactggaaggacagatttggttgctgtgctctgcgaaagccagttaccacggttaagcagttccccaactgacttaaccttcgatcaaaccacctccccaggtggttttttcgtttacagggcaaaagattacgcgcagaaaaaaaggatctcaagaagatcctttgatc

SEQ ID NO: 14 - DNA, 11650 bp, synthetic construct
  source 1..11650: mol_type = other DNA
ttttctactgaaccgctctagatttcagtgcaatttatctcttcaaatgtagcacctgaagtcagccccatacgatataagttgtaattctcatgttagtcatgccccgcgcccaccggaaggagctgactgggttgaaggctctcaagggcatcggtcgcacgcttgtgaaacccatctaattgggaattccccctgcctcgcgcgtttcggtgatgacggtgaaaacctctgacacagcgatcgcttatgacaacttgacggctacatcattcactttttcttcacaaccggcacggaactcgctcgggctggccccggtgcattttttaaatacccgcgagaaatagagttgatcgtcaaaaccaacattgcgaccgacggtggcgataggcatccgggtggtgctcaaaagcagcttcgcctggctgatacgttggtcctcgcgccagcttaagacgctaatccctaactgctggcggaaaagatgtgacagacgcgacggcgacaagcaaacatgctgtgcgacgctggcgatatcaaaattgctgtctgccaggtgatcgctgatgtactgacaagcctcgcgtacccgattatccatcggtggatggagcgactcgttaatcgcttccatgcgccgcagtaacaattgctcaagcagatttatcgccagcagctccgaatagcgcccttccccttgcccggcgttaatgatttgcccaaacaggtcgctgaaatgcggctggtgcgcttcatccgggcgaaagaaccccgtattggcaaatattgacggccagttaagccattcatgccagtaggcgcgcggacgaaagtaaacccactggtgataccattcgcgagcctccggatgacgaccgtagtgatgaatctctcctggcgggaacagcaaaatatcacccggtcggcaaacaaattctcgtccctgatttttcaccaccccctgaccgcgaatggtgagattgagaatataacctttcattcccagcggtcggtcgataaaaaaatcgagataaccgttggcctcaatcggcgttaaacccgccaccagatgggcattaaacgagtatcccggcagcaggggatcattttgcgcttcagccatacttttcatactcccgccattcagagaagaaaccaattgtccatattgcatcagacattgccgtcactgcgtcttttactggctcttctcgctaaccaaaccggtaaccccgcttattaaaagcattctgtaacaaagcgggaccaaagccatgacaaaaacgcgtaacaaaagtgtctataatcacggcagaaaagtccacattgattatttgcacggcgtcacactttgctatgccatagcatttttatccataagattagcggatcctacctgacgctttttatcgcaactctctactgtttctccatacccgggatccgaattcgagcgaaggagatatacatatgtttttgcaaagacctaaaccttacagcgatgaaagtttagaaagtttctttatccgagtggctaacaaaaatggctacggtgatgtccatcgcttcctagaagccactaaacgattccttcaagacattgaccataatggctatcaaacctttccgactgatataactcggataaacccatactcagctaaaaacagttccagcgcacgaactgcgtcattcctgaaacttgcacaattgacatttaatgaaccgccagagctacttgggttggcaattaacagaacaaacatgaaatactcgccgtcaactagcgcggttgttagaggtgcagaagtctttcctcgcagtttactacggacgcactccatcccctgctgtcctttgtgtctgcgagaaaatggctacgcctcctacctttggcactttcaggggtacgaatactgccacagccataacgtacctttaattaccacttgtagctgtggtaaggagtttgactaccgagtatctgggttaaagggcatttgctgcaaatgcaaggagcctatcaccttaaccagcagggagaacggtcatgaggcagcgtgtactgtttcaaactggcttgctggccatgaatctaaacctctgccaaatcttcctaaaagctaccgatggggtttagttcattggtggatgggtattaaagatagcgagttcgatcacttttcgttcgttcaatttttctcaaactggccaaggtcattccactcgataatcgaagatgaagtagagttcaaccttgagcatgctgttgtcagcacgtctgaattacgactaaaagatcttcttggtcgattgtttttcggttcaattcggttacctgagcggaatcttcaacacaatatcatccttggtgagcttctctgctatttagaaaatcgtttatggcaagacaagggattaatcgccaacctcaaaatgaacgcgttagaggcgactgtaatgttaaattgtagcctcgatcagattgcatcaatggttgaacaacgcatcttgaagccaaatcgaaaaagcaagcccaacagccctcttgatgttaccgattatctatttcatttcggcgatattttctgtctttggttagctgagttccaaagcgatgagtttaaccgttcgttttatgtgtcgaggtggtaaatgcaaactctgaaagaactaatcgcatccaatcctgacgacttaacaactgaacttaagagagcatttcgtccactcacaccgcatattgcaattgatggtaatgaacttgacgcactgacgatattagtcaatttaaccgataagactgatgatcagaaagacctgctcgatcgagccaaatgcaagcaaaaacttcgagatgaaaaatggtgggctagctgcataaattgcgttaattacagacaaagccataacccaaaattcccggatatacgttctgaaggcgtgattcgaacccaagccctgggtgaattaccgagtttcctactctcgtcctcaaaaatcccaccataccattggtcatatagccatgattcaaaatacgtcaacaaaagcgcattcctcaccaatgagttttgttgggatggtgagatctcatgtttgggtgagcttcttaaagatgcagatcacccactttggaatactttgaaaaagttaggttgttctcaaaaaacttgcaaagcaatggcaaaacaactagctgatattactctcacgactatcaatgtcacactcgcaccaaattacctgactcaaatatctctccccgatagtgatacatcctacatttcactctctcctgttgcatcgctatcgatgcaaagccactttcatcagaggctccaagatgaaaatcggcatagcgcgataacgcggtttagccgaactaccaacatgggggtcactgcgatgacatgtggcggcgcatttagaatgttaaagtctggcgctaagttttccagcccccctcatcaccgattaaacagtaaacgaagttggttgacgtcagagcatgttcagtcattaaaacagtaccagcgcctcaacaaaagcctcatacctgaaaactctcggattgcactccgtagaaaatacaaaatcgagcttcaaaatatggtcagatcttggtttgcaatgcaagaccatacccttgattcgaacatacttatccaacatttgaatcatgacctatcttacttaggagccacaaaacgttttgcatacgatccagcgatgaccaagctctttactgagcttttgaaacgagagttatcaaattcaatcaataatggtgagcaacacactaatggatcgtttttagtcctaccgaatatcagggtttgtggcgcaacagctttaagctccccggtaacggtggggattccatcacttacagctttctttggcttcgttcacgcatttgaacggaatataaatcgcaccacctcatcgtttcgtgttgaatcctttgcgatatgcgtccatcaactacatgtcgagaagcgaggtttgacagcagagtttgtggaaaaaggcgacgggactatatccgctcccgcgacccgggatgactggcagtgtgatgtcgtatttagccttattttgaacaccaactttgctcaacatattgaccaagatacgttagttacatcactaccaaagcgattggctcggggttcagcaaaaattgcgattgatgactttaaacatatcaactcattctcgacattagaaacagcgatcgaatctctgccaatagaagctggtaggtggttatcactttacgcacagtcaaacaataatctaagtgatctattagcagccatgacagaggaccatcagctcatggcaagctgcgtcggttaccacttgttagaagagcccaaagataaaccaaactccctcagaggttacaaacacgctatcgccgagtgcatcattggactcattaactcaatcacctttagctcagagactgatcccaacacaatcttttggtcgctaaagaactatcaaaactacctagtggtacagccaaggagtatcaacgatgaaactaccgacaaatctagcctatgagcgctctatcgacccatcagatgtctgtttttttgtcgtctggcccgatgatagaaaaacacctttaacctacaattctcgtactctgctcgggcaaatggaagcggcatcattagcctatgatgtctcaggtcaaccaataaaaagtgccaccgctgaggcgttagctcaagggaaccctcatcaagttgatttctgccacgttccatacggtgcgagtcatattgaatgcagtttctccgtctcgttttcttctgaactacgtcaaccatataagtgtaactcaagcaaagttaaacaaacgctagtgcaattagtcgagctctacgaaacgaaaatcggctggactgagctagcaacccgatatttgatgaacatttgcaacggtaaatggctgtggaaaaatacccgtaaagcctattgctggaacattgtacttacaccttggccttggaacggggaaaaggttggatttgaagatattcgtactaactacacctcacggcaagactttaaaaataataaaaattggtctgctatagttgaaatgatcaaaaccgcattttctagtactgatgggctggcgatatttgaagtcagggccaccttgcacttgccaacgaatgctatggtgcggccaagccaagttttcacagaaaaagaaagtggcagtaaaagtaaatctaaaactcaaaacagtcgagtttttcagagtacaactattgatggtgaacgatcgccaatactaggggcctttaaaacgggagcagctattgcaaccattgacgactggtatcctgaagccactgagccactaagggtcggacggtttggggttcatcgcgaagatgtcacttgctaccgtcatccgtctaccggaaaagattttttctcgatattacaacaagcagagcactatattgaagtgttgagcgccaacaaaactcccgctcaagaaactatcaacgacatgcactttttaatggctaacctgattaagggtgggatgttccagcataaaggagactgactgtgaaatggtattataagacaatcacctttctgccagagttgtgcaacaacgagtcactggctgcaaagtgtctccgcgttctgcatggatttaactatcagtatgagacacgaaatatcggcgtttcatttccgctttggtgtgatgcaacggttggaaaaaagatttcatttgtcagcaagaacaagatagaactcgacttactacttaaacaacactatttcgtccaaatggaacaacttcaatactttcatatatccaacactgttctcgtcccagaagattgtacatacgtttcctttagacgctgtcaatctatagataagctcacagcagcagggctggcaaggaaaatcagacgcctggagaaacgtgctctatctagaggcgagcaatttgacccatcatcttttgctcaaaaagagcatactgcaatagcgcactaccactcacttggggagtccagcaaacagacgaaccgcaactttcgactcaatatcaggatgctctcggagcaaccccgtgaggggaactcgatttttagtagctatggcttatcaaattcagaaaactcgtttcagcctgtacccttaatctgacctttaataaggagatataccatggcgacaagtttacctacgccctcagcaattacgacttcggcgttagagtatgcattccatactcccgctcgcaatctaacgaaatctcgcggaaaaaacattcatcgttatgtcagtgtaaagatgagtaagaggattacggtagaatctactctagagtgtgatgcctgctatcactttgattttgagccaagtattgttcgcttttgcgctcaaccgattcgatttttatattatctcaatggtcagtctcactcctatgttcctgactttctagttcaatttgataccaacgagtttgttctatatgaagtaaagtcagcttatgctaagaacaaacctgattttgatgttgaatgggaggcgaaagtaaaagcagcaactgaactagggctagaattggagcttgttgaagagagtgatattagggatacggttgtattaaataatcttaagcgcatgcatcgttatgcttcgaaagatgagctgaataacgtacataactctctcttaaaaataataaagtacaatggcgcccaatctgcaagatgcttgggagaacagttgggtttaaaaggccgaactgttttaccaattttgtgcgatttgctgtcaaggtgtttactcgatacacgtttggataagcctctatctcttgaatctcgatttgagttggccagttatggctaagaaagggttctcaagtttccatagaaaagcagtctcttcccaagatacgcttgaatcgatagagcttgtctctagcgctaattgtctagaaagtgttacgtatcaagatatatcagcatttcccgaaacaattgcggtagagattaatttccgattaagcattcttcgctttttagcgcgaaagtgcgaaaccattgtggccaaatcaattgaaccacatcgtgtagagctacagcaaaactatagtagaaaaatacccagtgcaataacgatatatcgatggtggcttgcttttcgaaaatcagactacaaccccattagcttagcacctaatatcaaggatagaggtaatagagagacaaaagtgtcaacagttgttgattctattatggaacaggcagttgaaagagttatatctggacgaaaagtcaatgttagctctgcatataaacgtgttcgacgaaaagttcgtcaatacaatctaactcatggaacgaaatacacgtatcctaagtacgaatctgtaagaaagcgagtaaaaaagaaaaccccatttgagttattagccgcagggaaaggggagagagtagctaagagagagtttcgccgaatgggaaaaaagatcctcacgtctagcgtgctagagagggttgaaatagatcacactgtcgttgacctttttgcagtacacgaagagtatcgaatcccattgggccgaccttggcttactcaattggttgattgttacagtaaagctgtaatcggtttttatttaggtttcgagcctcctagctatgtgtcggtttcccttgcacttaagaatgcaatacaacgcaaagatgacttaatctcctcgtatgaatcgatcgagaatgaatggctatgttatggcatcccagacctactcgtaactgataatggtaaagagtttttgtcgaaagcatttgatcaagcatgtgaatcactattgatcaatgtgcatcaaaataaagttgagacgcccgacaacaaacctcatgttgaacgtaactacgggactattaatacttctctgttagacgatttacctgggaaatccttcagccagtaccttcaaagagaagggtacgactctgtgggagaagctacccttacactcaatgagattagagaaatttacttaatttggttggtggatatttatcataaaaaacccaatcagagaggcactaattgtcctaatgttgcgtggaaaaagggttgtcaagaatgggaaccagaggagttctctggttctaaagacgaattagactttaaatttgctattgttgattacaaacaacttactaaagtagggataactgtctacaaagaactgagttatagcaatgaccgtttagctgaatatagagggaagaaaggaaaccataaagttcagttcaagtataaccctgagtgtatggcagttatttgggtgttggatgaggatatgaatgagtactttacagttaatgcgattgactacgaatatgcaagtagagtatcactttggcaacataaatataacatgaaatatcaagcagaactaaattcagcagaatatgatgaggacaaggaaattgatgcagaaataaaaattgaagaaatcgcagatcgttcaattgttaagactaacaaaatcagagctcggaggcgtggcgctaggcatcaagagaatagcgcaagggctaagtcaatcagtaatgcgaacccggcctcgatacaaaaacatgaagatgaaatcgttagtgcagataatgacgattgggatattgattatgtctgagaaatcgtcaaatgagtgaaacgcgtgaggctcgtatatcaagagctaaaagggcatttgtatccacaccgagcgttaggaaaatcttgagttacatggatagatgtagagatctatcagacctagagtctgagcctacatgcatgatggtctatggtgcttcgggtgtaggtaaaacgaccgtcatcaagaaatacttaaatcaaaacagaagagagtccgaagccgggggcgatataataccggttttgcatattgagttgccagacaatgcgaagccagtagatgcagcaagggaattgctggttgaaatgggtgacccgctagcactttatgaaactgacttagctagattgacgaaaagactgactgaattaatccctgcggtcggcgtgaagctgattattatcgatgagttccaacatttggtggaagaaaggtcaaatcgggttcttacccaagtaggtaattggctaaaaatgatacttaacaaaacgaaatgtccaattgttatatttggtatgccatactcaaaagttgtactgcaagcaaactcgcaacttcacgggcgattttccattcaggttgaactgcgcccctttagctaccagggaggtagaggtgtatttaaaacttttttggaataccttgataaagccctaccttttgaaaaacaggctggcttagccaacgaaagtttgcagaaaaaattgtatgcattctctcagggaaacatgcgttcgttgagaaaccttatttatcaagcatctatcgaagcaattgataatcagcatgagacgataaccgaagaagatttcgtttttgcatcgaagttgacatcgggcgataaacccaactcatggaaaaatccttttgaggagggtgttgaggtaacagaagatatgttacgaccgccaccaaaagatattggttgggaggactatttgagacattcaaccccgagagtgagtaaaccaggtagaaataaaaactttttcgaataacctaggctgctgcgctgctgccaccgctgagcaataactagcataaccccttggggcctctaaacgggtcttgaggggttttttgctgaaacctcaggcattgaacctgcacggtaccgagctcgaattcactggccgtcgttttacaacgtcgtgactgggaaaaccctggcgttacccaacttaatcgccttgctatcgtggccggatcttgcggcccctcggcttgaacgaattgttagacattatttgccgactaccttggtgatctcgcctttcacgtagtggacaaattcttccaactgatctgcgcgcgaggccaagcgatcttcttcttgtccaagataagcctgtctagcttcaagtatgacgggctgatactgggccggcaggcgctccattgcccagtcggcagcgacatccttcggcgcgattttgccggttactgcgctgtaccaaatgcgggacaacgtaagcactacatttcgctcatcgccagcccagtcgggcggcgagttccatagcgttaaggtttcatttagcgcctcaaatagatcctgttcaggaaccggatcaaagagttcctccgccgctggacctaccaaggcaacgctatgttctcttgcttttgtcagcaagatagccagatcaatgtcgatcgtggctggctcgaagatacctgcaagaatgtcattgcgctgccattctccaaattgcagttcgcgcttagctggataacgccacggaatgatgtcgtcgtgcacaacaatggtgacttctacagcgcggagaatctcgctctctccaggggaagccgaagtttccaaaaggtcgttgatcaaagctcgccgcgttgtttcatcaagccttacggtcaccgtaaccagcaaatcaatatcactgtgtggcttcaggccgccatccactgcggagccgtacaaatgtacggccagcaacgtcggttcgagatggcgctcgatgacgccaactacctctgatagttgagtcgatacttcggcgatcaccgcttccctcatactcttcctttttcaatattattgaagcatttatcagggttattgtctcatgagcggatacatatttgaatgtatttagaaaaataaacaaatagctagctcactcggtcgctacgctccgggcgtgagactgcggcgggcgctgcggacacatacaaagttacccacagattccgtggataagcaggggactaacatgtgaggcaaaacagcagggccgcgccggtggcgtttttccataggctccgccctcctgccagagttcacataaacagacgcttttccggtgcatctgtgggagccgtgaggctcaaccatgaatctgacagtacgggcgaaacccgacaggacttaaagatccccaccgtttccggcgggtcgctccctcttgcgctctcctgttccgaccctgccgtttaccggatacctgttccgcctttctcccttacgggaagtgtggcgctttctcatagctcacacactggtatctcggctcggtgtaggtcgttcgctccaagctgggctgtaagcaagaactccccgttcagcccgactgctgcgccttatccggtaactgttcacttgagtccaacccggaaaagcacggtaaaacgccactggcagcagccattggtaactgggagttcgcagaggatttgtttagctaaacacgcggttgctcttgaagtgtgcgccaaagtccggctacactggaaggacagatttggttgctgtgctctgcgaaagccagttaccacggttaagcagttccccaactgacttaaccttcgatcaaaccacctccccaggtggttttttcgtttacagggcaaaagattacgcgcagaaaaaaaggatctcaagaagatcctttgatc

SEQ ID NO: 15 - DNA, 8095 bp, synthetic construct
  source 1..8095: mol_type = other DNA
ttttctactgaaccgctctagatttcagtgcaatttatctcttcaaatgtagcacctgaagtcagccccatacgatataagttgtaattctcatgttagtcatgccccgcgcccaccggaaggagctgactgggttgaaggctctcaagggcatcggtcgcacgcttgtgaaacccatctaattgggaattccccctgcctcgcgcgtttcggtgatgacggtgaaaacctctgacacagcgatcgcttatgacaacttgacggctacatcattcactttttcttcacaaccggcacggaactcgctcgggctggccccggtgcattttttaaatacccgcgagaaatagagttgatcgtcaaaaccaacattgcgaccgacggtggcgataggcatccgggtggtgctcaaaagcagcttcgcctggctgatacgttggtcctcgcgccagcttaagacgctaatccctaactgctggcggaaaagatgtgacagacgcgacggcgacaagcaaacatgctgtgcgacgctggcgatatcaaaattgctgtctgccaggtgatcgctgatgtactgacaagcctcgcgtacccgattatccatcggtggatggagcgactcgttaatcgcttccatgcgccgcagtaacaattgctcaagcagatttatcgccagcagctccgaatagcgcccttccccttgcccggcgttaatgatttgcccaaacaggtcgctgaaatgcggctggtgcgcttcatccgggcgaaagaaccccgtattggcaaatattgacggccagttaagccattcatgccagtaggcgcgcggacgaaagtaaacccactggtgataccattcgcgagcctccggatgacgaccgtagtgatgaatctctcctggcgggaacagcaaaatatcacccggtcggcaaacaaattctcgtccctgatttttcaccaccccctgaccgcgaatggtgagattgagaatataacctttcattcccagcggtcggtcgataaaaaaatcgagataaccgttggcctcaatcggcgttaaacccgccaccagatgggcattaaacgagtatcccggcagcaggggatcattttgcgcttcagccatacttttcatactcccgccattcagagaagaaaccaattgtccatattgcatcagacattgccgtcactgcgtcttttactggctcttctcgctaaccaaaccggtaaccccgcttattaaaagcattctgtaacaaagcgggaccaaagccatgacaaaaacgcgtaacaaaagtgtctataatcacggcagaaaagtccacattgattatttgcacggcgtcacactttgctatgccatagcatttttatccataagattagcggatcctacctgacgctttttatcgcaactctctactgtttctccatacccgggatccgaattcgagcgaaggagatatacatatgtttttgcaaagacctaaaccttacagcgatgaaagtttagaaagtttctttatccgagtggctaacaaaaatggctacggtgatgtccatcgcttcctagaagccactaaacgattccttcaagacattgaccataatggctatcaaacctttccgactgatataactcggataaacccatactcagctaaaaacagttccagcgcacgaactgcgtcattcctgaaacttgcacaattgacatttaatgaaccgccagagctacttgggttggcaattaacagaacaaacatgaaatactcgccgtcaactagcgcggttgttagaggtgcagaagtctttcctcgcagtttactacggacgcactccatcccctgctgtcctttgtgtctgcgagaaaatggctacgcctcctacctttggcactttcaggggtacgaatactgccacagccataacgtacctttaattaccacttgtagctgtggtaaggagtttgactaccgagtatctgggttaaagggcatttgctgcaaatgcaaggagcctatcaccttaaccagcagggagaacggtcatgaggcagcgtgtactgtttcaaactggcttgctggccatgaatctaaacctctgccaaatcttcctaaaagctaccgatggggtttagttcattggtggatgggtattaaagatagcgagttcgatcacttttcgttcgttcaatttttctcaaactggccaaggtcattccactcgataatcgaagatgaagtagagttcaaccttgagcatgctgttgtcagcacgtctgaattacgactaaaagatcttcttggtcgattgtttttcggttcaattcggttacctgagcggaatcttcaacacaatatcatccttggtgagcttctctgctatttagaaaatcgtttatggcaagacaagggattaatcgccaacctcaaaatgaacgcgttagaggcgactgtaatgttaaattgtagcctcgatcagattgcatcaatggttgaacaacgcatcttgaagccaaatcgaaaaagcaagcccaacagccctcttgatgttaccgattatctatttcatttcggcgatattttctgtctttggttagctgagttccaaagcgatgagtttaaccgttcgttttatgtgtcgaggtggtaacctttaataaggagatataccatggcgacaagtttacctacgccctcagcaattacgacttcggcgttagagtatgcattccatactcccgctcgcaatctaacgaaatctcgcggaaaaaacattcatcgttatgtcagtgtaaagatgagtaagaggattacggtagaatctactctagagtgtgatgcctgctatcactttgattttgagccaagtattgttcgcttttgcgctcaaccgattcgatttttatattatctcaatggtcagtctcactcctatgttcctgactttctagttcaatttgataccaacgagtttgttctatatgaagtaaagtcagcttatgctaagaacaaacctgattttgatgttgaatgggaggcgaaagtaaaagcagcaactgaactagggctagaattggagcttgttgaagagagtgatattagggatacggttgtattaaataatcttaagcgcatgcatcgttatgcttcgaaagatgagctgaataacgtacataactctctcttaaaaataataaagtacaatggcgcccaatctgcaagatgcttgggagaacagttgggtttaaaaggccgaactgttttaccaattttgtgcgatttgctgtcaaggtgtttactcgatacacgtttggataagcctctatctcttgaatctcgatttgagttggccagttatggctaagaaagggttctcaagtttccatagaaaagcagtctcttcccaagatacgcttgaatcgatagagcttgtctctagcgctaattgtctagaaagtgttacgtatcaagatatatcagcatttcccgaaacaattgcggtagagattaatttccgattaagcattcttcgctttttagcgcgaaagtgcgaaaccattgtggccaaatcaattgaaccacatcgtgtagagctacagcaaaactatagtagaaaaatacccagtgcaataacgatatatcgatggtggcttgcttttcgaaaatcagactacaaccccattagcttagcacctaatatcaaggatagaggtaatagagagacaaaagtgtcaacagttgttgattctattatggaacaggcagttgaaagagttatatctggacgaaaagtcaatgttagctctgcatataaacgtgttcgacgaaaagttcgtcaatacaatctaactcatggaacgaaatacacgtatcctaagtacgaatctgtaagaaagcgagtaaaaaagaaaaccccatttgagttattagccgcagggaaaggggagagagtagctaagagagagtttcgccgaatgggaaaaaagatcctcacgtctagcgtgctagagagggttgaaatagatcacactgtcgttgacctttttgcagtacacgaagagtatcgaatcccattgggccgaccttggcttactcaattggttgattgttacagtaaagctgtaatcggtttttatttaggtttcgagcctcctagctatgtgtcggtttcccttgcacttaagaatgcaatacaacgcaaagatgacttaatctcctcgtatgaatcgatcgagaatgaatggctatgttatggcatcccagacctactcgtaactgataatggtaaagagtttttgtcgaaagcatttgatcaagcatgtgaatcactattgatcaatgtgcatcaaaataaagttgagacgcccgacaacaaacctcatgttgaacgtaactacgggactattaatacttctctgttagacgatttacctgggaaatccttcagccagtaccttcaaagagaagggtacgactctgtgggagaagctacccttacactcaatgagattagagaaatttacttaatttggttggtggatatttatcataaaaaacccaatcagagaggcactaattgtcctaatgttgcgtggaaaaagggttgtcaagaatgggaaccagaggagttctctggttctaaagacgaattagactttaaatttgctattgttgattacaaacaacttactaaagtagggataactgtctacaaagaactgagttatagcaatgaccgtttagctgaatatagagggaagaaaggaaaccataaagttcagttcaagtataaccctgagtgtatggcagttatttgggtgttggatgaggatatgaatgagtactttacagttaatgcgattgactacgaatatgcaagtagagtatcactttggcaacataaatataacatgaaatatcaagcagaactaaattcagcagaatatgatgaggacaaggaaattgatgcagaaataaaaattgaagaaatcgcagatcgttcaattgttaagactaacaaaatcagagctcggaggcgtggcgctaggcatcaagagaatagcgcaagggctaagtcaatcagtaatgcgaacccggcctcgatacaaaaacatgaagatgaaatcgttagtgcagataatgacgattgggatattgattatgtctgagaaatcgtcaaatgagtgaaacgcgtgaggctcgtatatcaagagctaaaagggcatttgtatccacaccgagcgttaggaaaatcttgagttacatggatagatgtagagatctatcagacctagagtctgagcctacatgcatgatggtctatggtgcttcgggtgtaggtaaaacgaccgtcatcaagaaatacttaaatcaaaacagaagagagtccgaagccgggggcgatataataccggttttgcatattgagttgccagacaatgcgaagccagtagatgcagcaagggaattgctggttgaaatgggtgacccgctagcactttatgaaactgacttagctagattgacgaaaagactgactgaattaatccctgcggtcggcgtgaagctgattattatcgatgagttccaacatttggtggaagaaaggtcaaatcgggttcttacccaagtaggtaattggctaaaaatgatacttaacaaaacgaaatgtccaattgttatatttggtatgccatactcaaaagttgtactgcaagcaaactcgcaacttcacgggcgattttccattcaggttgaactgcgcccctttagctaccagggaggtagaggtgtatttaaaacttttttggaataccttgataaagccctaccttttgaaaaacaggctggcttagccaacgaaagtttgcagaaaaaattgtatgcattctctcagggaaacatgcgttcgttgagaaaccttatttatcaagcatctatcgaagcaattgataatcagcatgagacgataaccgaagaagatttcgtttttgcatcgaagttgacatcgggcgataaacccaactcatggaaaaatccttttgaggagggtgttgaggtaacagaagatatgttacgaccgccaccaaaagatattggttgggaggactatttgagacattcaaccccgagagtgagtaaaccaggtagaaataaaaactttttcgaataacctaggctgctgcgctgctgccaccgctgagcaataactagcataaccccttggggcctctaaacgggtcttgaggggttttttgctgaaacctcaggcattgaacctgcacggtaccgagctcgaattcactggccgtcgttttacaacgtcgtgactgggaaaaccctggcgttacccaacttaatcgccttgctatcgtggccggatcttgcggcccctcggcttgaacgaattgttagacattatttgccgactaccttggtgatctcgcctttcacgtagtggacaaattcttccaactgatctgcgcgcgaggccaagcgatcttcttcttgtccaagataagcctgtctagcttcaagtatgacgggctgatactgggccggcaggcgctccattgcccagtcggcagcgacatccttcggcgcgattttgccggttactgcgctgtaccaaatgcgggacaacgtaagcactacatttcgctcatcgccagcccagtcgggcggcgagttccatagcgttaaggtttcatttagcgcctcaaatagatcctgttcaggaaccggatcaaagagttcctccgccgctggacctaccaaggcaacgctatgttctcttgcttttgtcagcaagatagccagatcaatgtcgatcgtggctggctcgaagatacctgcaagaatgtcattgcgctgccattctccaaattgcagttcgcgcttagctggataacgccacggaatgatgtcgtcgtgcacaacaatggtgacttctacagcgcggagaatctcgctctctccaggggaagccgaagtttccaaaaggtcgttgatcaaagctcgccgcgttgtttcatcaagccttacggtcaccgtaaccagcaaatcaatatcactgtgtggcttcaggccgccatccactgcggagccgtacaaatgtacggccagcaacgtcggttcgagatggcgctcgatgacgccaactacctctgatagttgagtcgatacttcggcgatcaccgcttccctcatactcttcctttttcaatattattgaagcatttatcagggttattgtctcatgagcggatacatatttgaatgtatttagaaaaataaacaaatagctagctcactcggtcgctacgctccgggcgtgagactgcggcgggcgctgcggacacatacaaagttacccacagattccgtggataagcaggggactaacatgtgaggcaaaacagcagggccgcgccggtggcgtttttccataggctccgccctcctgccagagttcacataaacagacgcttttccggtgcatctgtgggagccgtgaggctcaaccatgaatctgacagtacgggcgaaacccgacaggacttaaagatccccaccgtttccggcgggtcgctccctcttgcgctctcctgttccgaccctgccgtttaccggatacctgttccgcctttctcccttacgggaagtgtggcgctttctcatagctcacacactggtatctcggctcggtgtaggtcgttcgctccaagctgggctgtaagcaagaactccccgttcagcccgactgctgcgccttatccggtaactgttcacttgagtccaacccggaaaagcacggtaaaacgccactggcagcagccattggtaactgggagttcgcagaggatttgtttagctaaacacgcggttgctcttgaagtgtgcgccaaagtccggctacactggaaggacagatttggttgctgtgctctgcgaaagccagttaccacggttaagcagttccccaactgacttaaccttcgatcaaaccacctccccaggtggttttttcgtttacagggcaaaagattacgcgcagaaaaaaaggatctcaagaagatcctttgatc

SEQ ID NO: 16 - DNA, 6879 bp, synthetic construct
  source 1..6879: mol_type = other DNA
ttttctactgaaccgctctagatttcagtgcaatttatctcttcaaatgtagcacctgaagtcagccccatacgatataagttgtaattctcatgttagtcatgccccgcgcccaccggaaggagctgactgggttgaaggctctcaagggcatcggtcgcacgcttgtgaaacccatctaattgggaattccccctgcctcgcgcgtttcggtgatgacggtgaaaacctctgacacagcgatcgcttatgacaacttgacggctacatcattcactttttcttcacaaccggcacggaactcgctcgggctggccccggtgcattttttaaatacccgcgagaaatagagttgatcgtcaaaaccaacattgcgaccgacggtggcgataggcatccgggtggtgctcaaaagcagcttcgcctggctgatacgttggtcctcgcgccagcttaagacgctaatccctaactgctggcggaaaagatgtgacagacgcgacggcgacaagcaaacatgctgtgcgacgctggcgatatcaaaattgctgtctgccaggtgatcgctgatgtactgacaagcctcgcgtacccgattatccatcggtggatggagcgactcgttaatcgcttccatgcgccgcagtaacaattgctcaagcagatttatcgccagcagctccgaatagcgcccttccccttgcccggcgttaatgatttgcccaaacaggtcgctgaaatgcggctggtgcgcttcatccgggcgaaagaaccccgtattggcaaatattgacggccagttaagccattcatgccagtaggcgcgcggacgaaagtaaacccactggtgataccattcgcgagcctccggatgacgaccgtagtgatgaatctctcctggcgggaacagcaaaatatcacccggtcggcaaacaaattctcgtccctgatttttcaccaccccctgaccgcgaatggtgagattgagaatataacctttcattcccagcggtcggtcgataaaaaaatcgagataaccgttggcctcaatcggcgttaaacccgccaccagatgggcattaaacgagtatcccggcagcaggggatcattttgcgcttcagccatacttttcatactcccgccattcagagaagaaaccaattgtccatattgcatcagacattgccgtcactgcgtcttttactggctcttctcgctaaccaaaccggtaaccccgcttattaaaagcattctgtaacaaagcgggaccaaagccatgacaaaaacgcgtaacaaaagtgtctataatcacggcagaaaagtccacattgattatttgcacggcgtcacactttgctatgccatagcatttttatccataagattagcggatcctacctgacgctttttatcgcaactctctactgtttctccatacccgcctttaataaggagatataccatggcgacaagtttacctacgccctcagcaattacgacttcggcgttagagtatgcattccatactcccgctcgcaatctaacgaaatctcgcggaaaaaacattcatcgttatgtcagtgtaaagatgagtaagaggattacggtagaatctactctagagtgtgatgcctgctatcactttgattttgagccaagtattgttcgcttttgcgctcaaccgattcgatttttatattatctcaatggtcagtctcactcctatgttcctgactttctagttcaatttgataccaacgagtttgttctatatgaagtaaagtcagcttatgctaagaacaaacctgattttgatgttgaatgggaggcgaaagtaaaagcagcaactgaactagggctagaattggagcttgttgaagagagtgatattagggatacggttgtattaaataatcttaagcgcatgcatcgttatgcttcgaaagatgagctgaataacgtacataactctctcttaaaaataataaagtacaatggcgcccaatctgcaagatgcttgggagaacagttgggtttaaaaggccgaactgttttaccaattttgtgcgatttgctgtcaaggtgtttactcgatacacgtttggataagcctctatctcttgaatctcgatttgagttggccagttatggctaagaaagggttctcaagtttccatagaaaagcagtctcttcccaagatacgcttgaatcgatagagcttgtctctagcgctaattgtctagaaagtgttacgtatcaagatatatcagcatttcccgaaacaattgcggtagagattaatttccgattaagcattcttcgctttttagcgcgaaagtgcgaaaccattgtggccaaatcaattgaaccacatcgtgtagagctacagcaaaactatagtagaaaaatacccagtgcaataacgatatatcgatggtggcttgcttttcgaaaatcagactacaaccccattagcttagcacctaatatcaaggatagaggtaatagagagacaaaagtgtcaacagttgttgattctattatggaacaggcagttgaaagagttatatctggacgaaaagtcaatgttagctctgcatataaacgtgttcgacgaaaagttcgtcaatacaatctaactcatggaacgaaatacacgtatcctaagtacgaatctgtaagaaagcgagtaaaaaagaaaaccccatttgagttattagccgcagggaaaggggagagagtagctaagagagagtttcgccgaatgggaaaaaagatcctcacgtctagcgtgctagagagggttgaaatagatcacactgtcgttgacctttttgcagtacacgaagagtatcgaatcccattgggccgaccttggcttactcaattggttgattgttacagtaaagctgtaatcggtttttatttaggtttcgagcctcctagctatgtgtcggtttcccttgcacttaagaatgcaatacaacgcaaagatgacttaatctcctcgtatgaatcgatcgagaatgaatggctatgttatggcatcccagacctactcgtaactgataatggtaaagagtttttgtcgaaagcatttgatcaagcatgtgaatcactattgatcaatgtgcatcaaaataaagttgagacgcccgacaacaaacctcatgttgaacgtaactacgggactattaatacttctctgttagacgatttacctgggaaatccttcagccagtaccttcaaagagaagggtacgactctgtgggagaagctacccttacactcaatgagattagagaaatttacttaatttggttggtggatatttatcataaaaaacccaatcagagaggcactaattgtcctaatgttgcgtggaaaaagggttgtcaagaatgggaaccagaggagttctctggttctaaagacgaattagactttaaatttgctattgttgattacaaacaacttactaaagtagggataactgtctacaaagaactgagttatagcaatgaccgtttagctgaatatagagggaagaaaggaaaccataaagttcagttcaagtataaccctgagtgtatggcagttatttgggtgttggatgaggatatgaatgagtactttacagttaatgcgattgactacgaatatgcaagtagagtatcactttggcaacataaatataacatgaaatatcaagcagaactaaattcagcagaatatgatgaggacaaggaaattgatgcagaaataaaaattgaagaaatcgcagatcgttcaattgttaagactaacaaaatcagagctcggaggcgtggcgctaggcatcaagagaatagcgcaagggctaagtcaatcagtaatgcgaacccggcctcgatacaaaaacatgaagatgaaatcgttagtgcagataatgacgattgggatattgattatgtctgagaaatcgtcaaatgagtgaaacgcgtgaggctcgtatatcaagagctaaaagggcatttgtatccacaccgagcgttaggaaaatcttgagttacatggatagatgtagagatctatcagacctagagtctgagcctacatgcatgatggtctatggtgcttcgggtgtaggtaaaacgaccgtcatcaagaaatacttaaatcaaaacagaagagagtccgaagccgggggcgatataataccggttttgcatattgagttgccagacaatgcgaagccagtagatgcagcaagggaattgctggttgaaatgggtgacccgctagcactttatgaaactgacttagctagattgacgaaaagactgactgaattaatccctgcggtcggcgtgaagctgattattatcgatgagttccaacatttggtggaagaaaggtcaaatcgggttcttacccaagtaggtaattggctaaaaatgatacttaacaaaacgaaatgtccaattgttatatttggtatgccatactcaaaagttgtactgcaagcaaactcgcaacttcacgggcgattttccattcaggttgaactgcgcccctttagctaccagggaggtagaggtgtatttaaaacttttttggaataccttgataaagccctaccttttgaaaaacaggctggcttagccaacgaaagtttgcagaaaaaattgtatgcattctctcagggaaacatgcgttcgttgagaaaccttatttatcaagcatctatcgaagcaattgataatcagcatgagacgataaccgaagaagatttcgtttttgcatcgaagttgacatcgggcgataaacccaactcatggaaaaatccttttgaggagggtgttgaggtaacagaagatatgttacgaccgccaccaaaagatattggttgggaggactatttgagacattcaaccccgagagtgagtaaaccaggtagaaataaaaactttttcgaataacctaggctgctgcgctgctgccaccgctgagcaataactagcataaccccttggggcctctaaacgggtcttgaggggttttttgctgaaacctcaggcattgaacctgcacggtaccgagctcgaattcactggccgtcgttttacaacgtcgtgactgggaaaaccctggcgttacccaacttaatcgccttgctatcgtggccggatcttgcggcccctcggcttgaacgaattgttagacattatttgccgactaccttggtgatctcgcctttcacgtagtggacaaattcttccaactgatctgcgcgcgaggccaagcgatcttcttcttgtccaagataagcctgtctagcttcaagtatgacgggctgatactgggccggcaggcgctccattgcccagtcggcagcgacatccttcggcgcgattttgccggttactgcgctgtaccaaatgcgggacaacgtaagcactacatttcgctcatcgccagcccagtcgggcggcgagttccatagcgttaaggtttcatttagcgcctcaaatagatcctgttcaggaaccggatcaaagagttcctccgccgctggacctaccaaggcaacgctatgttctcttgcttttgtcagcaagatagccagatcaatgtcgatcgtggctggctcgaagatacctgcaagaatgtcattgcgctgccattctccaaattgcagttcgcgcttagctggataacgccacggaatgatgtcgtcgtgcacaacaatggtgacttctacagcgcggagaatctcgctctctccaggggaagccgaagtttccaaaaggtcgttgatcaaagctcgccgcgttgtttcatcaagccttacggtcaccgtaaccagcaaatcaatatcactgtgtggcttcaggccgccatccactgcggagccgtacaaatgtacggccagcaacgtcggttcgagatggcgctcgatgacgccaactacctctgatagttgagtcgatacttcggcgatcaccgcttccctcatactcttcctttttcaatattattgaagcatttatcagggttattgtctcatgagcggatacatatttgaatgtatttagaaaaataaacaaatagctagctcactcggtcgctacgctccgggcgtgagactgcggcgggcgctgcggacacatacaaagttacccacagattccgtggataagcaggggactaacatgtgaggcaaaacagcagggccgcgccggtggcgtttttccataggctccgccctcctgccagagttcacataaacagacgcttttccggtgcatctgtgggagccgtgaggctcaaccatgaatctgacagtacgggcgaaacccgacaggacttaaagatccccaccgtttccggcgggtcgctccctcttgcgctctcctgttccgaccctgccgtttaccggatacctgttccgcctttctcccttacgggaagtgtggcgctttctcatagctcacacactggtatctcggctcggtgtaggtcgttcgctccaagctgggctgtaagcaagaactccccgttcagcccgactgctgcgccttatccggtaactgttcacttgagtccaacccggaaaagcacggtaaaacgccactggcagcagccattggtaactgggagttcgcagaggatttgtttagctaaacacgcggttgctcttgaagtgtgcgccaaagtccggctacactggaaggacagatttggttgctgtgctctgcgaaagccagttaccacggttaagcagttccccaactgacttaaccttcgatcaaaccacctccccaggtggttttttcgtttacagggcaaaagattacgcgcagaaaaaaaggatctcaagaagatcctttgatc

SEQ ID NO: 17 - DNA, 8375 bp, synthetic construct
  source 1..8375: mol_type = other DNA
ttttctactgaaccgctctagatttcagtgcaatttatctcttcaaatgtagcacctgaagtcagccccatacgatataagttgtaattctcatgttagtcatgccccgcgcccaccggaaggagctgactgggttgaaggctctcaagggcatcggtcgcacgcttgtgttgacagctagctcagtcctaggtataatactagtcacgtgaactgccgagtaggtagctgataacttagcggaatgctggtacgggctgataaagaagtgaactgccgagtaggtagctgataactcgagagatccggctgctaacaaacccgcttaaggaagatggccaacttatttacataaggctgctgccaccgctgagcaataactagcataaccccttggggcctctaaacgggtcttgaggggttttttggtttaaacccatctaattgggaattccccctgcctcgcgcgtttcggtgatgacggtgaaaacctctgacacagcgatcgcttatgacaacttgacggctacatcattcactttttcttcacaaccggcacggaactcgctcgggctggccccggtgcattttttaaatacccgcgagaaatagagttgatcgtcaaaaccaacattgcgaccgacggtggcgataggcatccgggtggtgctcaaaagcagcttcgcctggctgatacgttggtcctcgcgccagcttaagacgctaatccctaactgctggcggaaaagatgtgacagacgcgacggcgacaagcaaacatgctgtgcgacgctggcgatatcaaaattgctgtctgccaggtgatcgctgatgtactgacaagcctcgcgtacccgattatccatcggtggatggagcgactcgttaatcgcttccatgcgccgcagtaacaattgctcaagcagatttatcgccagcagctccgaatagcgcccttccccttgcccggcgttaatgatttgcccaaacaggtcgctgaaatgcggctggtgcgcttcatccgggcgaaagaaccccgtattggcaaatattgacggccagttaagccattcatgccagtaggcgcgcggacgaaagtaaacccactggtgataccattcgcgagcctccggatgacgaccgtagtgatgaatctctcctggcgggaacagcaaaatatcacccggtcggcaaacaaattctcgtccctgatttttcaccaccccctgaccgcgaatggtgagattgagaatataacctttcattcccagcggtcggtcgataaaaaaatcgagataaccgttggcctcaatcggcgttaaacccgccaccagatgggcattaaacgagtatcccggcagcaggggatcattttgcgcttcagccatacttttcatactcccgccattcagagaagaaaccaattgtccatattgcatcagacattgccgtcactgcgtcttttactggctcttctcgctaaccaaaccggtaaccccgcttattaaaagcattctgtaacaaagcgggaccaaagccatgacaaaaacgcgtaacaaaagtgtctataatcacggcagaaaagtccacattgattatttgcacggcgtcacactttgctatgccatagcatttttatccataagattagcggatcctacctgacgctttttatcgcaactctctactgtttctccatacccgggatccgaattcgagcgaaggagatatacatatgtttttgcaaagacctaaaccttacagcgatgaaagtttagaaagtttctttatccgagtggctaacaaaaatggctacggtgatgtccatcgcttcctagaagccactaaacgattccttcaagacattgaccataatggctatcaaacctttccgactgatataactcggataaacccatactcagctaaaaacagttccagcgcacgaactgcgtcattcctgaaacttgcacaattgacatttaatgaaccgccagagctacttgggttggcaattaacagaacaaacatgaaatactcgccgtcaactagcgcggttgttagaggtgcagaagtctttcctcgcagtttactacggacgcactccatcccctgctgtcctttgtgtctgcgagaaaatggctacgcctcctacctttggcactttcaggggtacgaatactgccacagccataacgtacctttaattaccacttgtagctgtggtaaggagtttgactaccgagtatctgggttaaagggcatttgctgcaaatgcaaggagcctatcaccttaaccagcagggagaacggtcatgaggcagcgtgtactgtttcaaactggcttgctggccatgaatctaaacctctgccaaatcttcctaaaagctaccgatggggtttagttcattggtggatgggtattaaagatagcgagttcgatcacttttcgttcgttcaatttttctcaaactggccaaggtcattccactcgataatcgaagatgaagtagagttcaaccttgagcatgctgttgtcagcacgtctgaattacgactaaaagatcttcttggtcgattgtttttcggttcaattcggttacctgagcggaatcttcaacacaatatcatccttggtgagcttctctgctatttagaaaatcgtttatggcaagacaagggattaatcgccaacctcaaaatgaacgcgttagaggcgactgtaatgttaaattgtagcctcgatcagattgcatcaatggttgaacaacgcatcttgaagccaaatcgaaaaagcaagcccaacagccctcttgatgttaccgattatctatttcatttcggcgatattttctgtctttggttagctgagttccaaagcgatgagtttaaccgttcgttttatgtgtcgaggtggtaaatgcaaactctgaaagaactaatcgcatccaatcctgacgacttaacaactgaacttaagagagcatttcgtccactcacaccgcatattgcaattgatggtaatgaacttgacgcactgacgatattagtcaatttaaccgataagactgatgatcagaaagacctgctcgatcgagccaaatgcaagcaaaaacttcgagatgaaaaatggtgggctagctgcataaattgcgttaattacagacaaagccataacccaaaattcccggatatacgttctgaaggcgtgattcgaacccaagccctgggtgaattaccgagtttcctactctcgtcctcaaaaatcccaccataccattggtcatatagccatgattcaaaatacgtcaacaaaagcgcattcctcaccaatgagttttgttgggatggtgagatctcatgtttgggtgagcttcttaaagatgcagatcacccactttggaatactttgaaaaagttaggttgttctcaaaaaacttgcaaagcaatggcaaaacaactagctgatattactctcacgactatcaatgtcacactcgcaccaaattacctgactcaaatatctctccccgatagtgatacatcctacatttcactctctcctgttgcatcgctatcgatgcaaagccactttcatcagaggctccaagatgaaaatcggcatagcgcgataacgcggtttagccgaactaccaacatgggggtcactgcgatgacatgtggcggcgcatttagaatgttaaagtctggcgctaagttttccagcccccctcatcaccgattaaacagtaaacgaagttggttgacgtcagagcatgttcagtcattaaaacagtaccagcgcctcaacaaaagcctcatacctgaaaactctcggattgcactccgtagaaaatacaaaatcgagcttcaaaatatggtcagatcttggtttgcaatgcaagaccatacccttgattcgaacatacttatccaacatttgaatcatgacctatcttacttaggagccacaaaacgttttgcatacgatccagcgatgaccaagctctttactgagcttttgaaacgagagttatcaaattcaatcaataatggtgagcaacacactaatggatcgtttttagtcctaccgaatatcagggtttgtggcgcaacagctttaagctccccggtaacggtggggattccatcacttacagctttctttggcttcgttcacgcatttgaacggaatataaatcgcaccacctcatcgtttcgtgttgaatcctttgcgatatgcgtccatcaactacatgtcgagaagcgaggtttgacagcagagtttgtggaaaaaggcgacgggactatatccgctcccgcgacccgggatgactggcagtgtgatgtcgtatttagccttattttgaacaccaactttgctcaacatattgaccaagatacgttagttacatcactaccaaagcgattggctcggggttcagcaaaaattgcgattgatgactttaaacatatcaactcattctcgacattagaaacagcgatcgaatctctgccaatagaagctggtaggtggttatcactttacgcacagtcaaacaataatctaagtgatctattagcagccatgacagaggaccatcagctcatggcaagctgcgtcggttaccacttgttagaagagcccaaagataaaccaaactccctcagaggttacaaacacgctatcgccgagtgcatcattggactcattaactcaatcacctttagctcagagactgatcccaacacaatcttttggtcgctaaagaactatcaaaactacctagtggtacagccaaggagtatcaacgatgaaactaccgacaaatctagcctatgagcgctctatcgacccatcagatgtctgtttttttgtcgtctggcccgatgatagaaaaacacctttaacctacaattctcgtactctgctcgggcaaatggaagcggcatcattagcctatgatgtctcaggtcaaccaataaaaagtgccaccgctgaggcgttagctcaagggaaccctcatcaagttgatttctgccacgttccatacggtgcgagtcatattgaatgcagtttctccgtctcgttttcttctgaactacgtcaaccatataagtgtaactcaagcaaagttaaacaaacgctagtgcaattagtcgagctctacgaaacgaaaatcggctggactgagctagcaacccgatatttgatgaacatttgcaacggtaaatggctgtggaaaaatacccgtaaagcctattgctggaacattgtacttacaccttggccttggaacggggaaaaggttggatttgaagatattcgtactaactacacctcacggcaagactttaaaaataataaaaattggtctgctatagttgaaatgatcaaaaccgcattttctagtactgatgggctggcgatatttgaagtcagggccaccttgcacttgccaacgaatgctatggtgcggccaagccaagttttcacagaaaaagaaagtggcagtaaaagtaaatctaaaactcaaaacagtcgagtttttcagagtacaactattgatggtgaacgatcgccaatactaggggcctttaaaacgggagcagctattgcaaccattgacgactggtatcctgaagccactgagccactaagggtcggacggtttggggttcatcgcgaagatgtcacttgctaccgtcatccgtctaccggaaaagattttttctcgatattacaacaagcagagcactatattgaagtgttgagcgccaacaaaactcccgctcaagaaactatcaacgacatgcactttttaatggctaacctgattaagggtgggatgttccagcataaaggagactgactgtgaaatggtattataagacaatcacctttctgccagagttgtgcaacaacgagtcactggctgcaaagtgtctccgcgttctgcatggatttaactatcagtatgagacacgaaatatcggcgtttcatttccgctttggtgtgatgcaacggttggaaaaaagatttcatttgtcagcaagaacaagatagaactcgacttactacttaaacaacactatttcgtccaaatggaacaacttcaatactttcatatatccaacactgttctcgtcccagaagattgtacatacgtttcctttagacgctgtcaatctatagataagctcacagcagcagggctggcaaggaaaatcagacgcctggagaaacgtgctctatctagaggcgagcaatttgacccatcatcttttgctcaaaaagagcatactgcaatagcgcactaccactcacttggggagtccagcaaacagacgaaccgcaactttcgactcaatatcaggatgctctcggagcaaccccgtgaggggaactcgatttttagtagctatggcttatcaaattcagaaaactcgtttcagcctgtacccttaatctgatgctgccaccgctgagcaataactagcataaccccttggggcctctaaacgggtcttgaggggttttttgctgaaacctcaggcattgaacctgcacggtaccgagctcgaattcactggccgtcgttttacaacgtcgtgactgggaaaaccctggcgttacccaacttaatcgccttgctatcgtggccggatcttgcggcccctcggcttgaacgaattgttagacattatttgccgactaccttggtgatctcgcctttcacgtagtggacaaattcttccaactgatctgcgcgcgaggccaagcgatcttcttcttgtccaagataagcctgtctagcttcaagtatgacgggctgatactgggccggcaggcgctccattgcccagtcggcagcgacatccttcggcgcgattttgccggttactgcgctgtaccaaatgcgggacaacgtaagcactacatttcgctcatcgccagcccagtcgggcggcgagttccatagcgttaaggtttcatttagcgcctcaaatagatcctgttcaggaaccggatcaaagagttcctccgccgctggacctaccaaggcaacgctatgttctcttgcttttgtcagcaagatagccagatcaatgtcgatcgtggctggctcgaagatacctgcaagaatgtcattgcgctgccattctccaaattgcagttcgcgcttagctggataacgccacggaatgatgtcgtcgtgcacaacaatggtgacttctacagcgcggagaatctcgctctctccaggggaagccgaagtttccaaaaggtcgttgatcaaagctcgccgcgttgtttcatcaagccttacggtcaccgtaaccagcaaatcaatatcactgtgtggcttcaggccgccatccactgcggagccgtacaaatgtacggccagcaacgtcggttcgagatggcgctcgatgacgccaactacctctgatagttgagtcgatacttcggcgatcaccgcttccctcatactcttcctttttcaatattattgaagcatttatcagggttattgtctcatgagcggatacatatttgaatgtatttagaaaaataaacaaatagctagctcactcggtcgctacgctccgggcgtgagactgcggcgggcgctgcggacacatacaaagttacccacagattccgtggataagcaggggactaacatgtgaggcaaaacagcagggccgcgccggtggcgtttttccataggctccgccctcctgccagagttcacataaacagacgcttttccggtgcatctgtgggagccgtgaggctcaaccatgaatctgacagtacgggcgaaacccgacaggacttaaagatccccaccgtttccggcgggtcgctccctcttgcgctctcctgttccgaccctgccgtttaccggatacctgttccgcctttctcccttacgggaagtgtggcgctttctcatagctcacacactggtatctcggctcggtgtaggtcgttcgctccaagctgggctgtaagcaagaactccccgttcagcccgactgctgcgccttatccggtaactgttcacttgagtccaacccggaaaagcacggtaaaacgccactggcagcagccattggtaactgggagttcgcagaggatttgtttagctaaacacgcggttgctcttgaagtgtgcgccaaagtccggctacactggaaggacagatttggttgctgtgctctgcgaaagccagttaccacggttaagcagttccccaactgacttaaccttcgatcaaaccacctccccaggtggttttttcgtttacagggcaaaagattacgcgcagaaaaaaaggatctcaagaagatcctttgatc

SEQ ID NO: 18 - DNA, 3372 bp, synthetic construct
  source 1..3372: mol_type = other DNA
ttttctactgaaccgctctagatttcagtgcaatttatctcttcaaatgtagcacctgaagtcagccccatacgatataagttgtaattctcatgttagtcatgccccgcgcccaccggaaggagctgactgggttgaaggctctcaagggcatcggtcgcacgcttgtgaaacccatctaattgggaattccccctgcctcgcgcgtttcggtgatgacggtgaaaacctctgacacagcgatcgcttatgacaacttgacggctacatcattcactttttcttcacaaccggcacggaactcgctcgggctggccccggtgcattttttaaatacccgcgagaaatagagttgatcgtcaaaaccaacattgcgaccgacggtggcgataggcatccgggtggtgctcaaaagcagcttcgcctggctgatacgttggtcctcgcgccagcttaagacgctaatccctaactgctggcggaaaagatgtgacagacgcgacggcgacaagcaaacatgctgtgcgacgctggcgatatcaaaattgctgtctgccaggtgatcgctgatgtactgacaagcctcgcgtacccgattatccatcggtggatggagcgactcgttaatcgcttccatgcgccgcagtaacaattgctcaagcagatttatcgccagcagctccgaatagcgcccttccccttgcccggcgttaatgatttgcccaaacaggtcgctgaaatgcggctggtgcgcttcatccgggcgaaagaaccccgtattggcaaatattgacggccagttaagccattcatgccagtaggcgcgcggacgaaagtaaacccactggtgataccattcgcgagcctccggatgacgaccgtagtgatgaatctctcctggcgggaacagcaaaatatcacccggtcggcaaacaaattctcgtccctgatttttcaccaccccctgaccgcgaatggtgagattgagaatataacctttcattcccagcggtcggtcgataaaaaaatcgagataaccgttggcctcaatcggcgttaaacccgccaccagatgggcattaaacgagtatcccggcagcaggggatcattttgcgcttcagccatacttttcatactcccgccattcagagaagaaaccaattgtccatattgcatcagacattgccgtcactgcgtcttttactggctcttctcgctaaccaaaccggtaaccccgcttattaaaagcattctgtaacaaagcgggaccaaagccatgacaaaaacgcgtaacaaaagtgtctataatcacggcagaaaagtccacattgattatttgcacggcgtcacactttgctatgccatagcatttttatccataagattagcggatcctacctgacgctttttatcgcaactctctactgtttctccatacccgggatccgaattcgagcgaaggagatatacatgctgccaccgctgagcaataactagcataaccccttggggcctctaaacgggtcttgaggggttttttgctgaaacctcaggcattgaacctgcacggtaccgagctcgaattcactggccgtcgttttacaacgtcgtgactgggaaaaccctggcgttacccaacttaatcgccttgctatcgtggccggatcttgcggcccctcggcttgaacgaattgttagacattatttgccgactaccttggtgatctcgcctttcacgtagtggacaaattcttccaactgatctgcgcgcgaggccaagcgatcttcttcttgtccaagataagcctgtctagcttcaagtatgacgggctgatactgggccggcaggcgctccattgcccagtcggcagcgacatccttcggcgcgattttgccggttactgcgctgtaccaaatgcgggacaacgtaagcactacatttcgctcatcgccagcccagtcgggcggcgagttccatagcgttaaggtttcatttagcgcctcaaatagatcctgttcaggaaccggatcaaagagttcctccgccgctggacctaccaaggcaacgctatgttctcttgcttttgtcagcaagatagccagatcaatgtcgatcgtggctggctcgaagatacctgcaagaatgtcattgcgctgccattctccaaattgcagttcgcgcttagctggataacgccacggaatgatgtcgtcgtgcacaacaatggtgacttctacagcgcggagaatctcgctctctccaggggaagccgaagtttccaaaaggtcgttgatcaaagctcgccgcgttgtttcatcaagccttacggtcaccgtaaccagcaaatcaatatcactgtgtggcttcaggccgccatccactgcggagccgtacaaatgtacggccagcaacgtcggttcgagatggcgctcgatgacgccaactacctctgatagttgagtcgatacttcggcgatcaccgcttccctcatactcttcctttttcaatattattgaagcatttatcagggttattgtctcatgagcggatacatatttgaatgtatttagaaaaataaacaaatagctagctcactcggtcgctacgctccgggcgtgagactgcggcgggcgctgcggacacatacaaagttacccacagattccgtggataagcaggggactaacatgtgaggcaaaacagcagggccgcgccggtggcgtttttccataggctccgccctcctgccagagttcacataaacagacgcttttccggtgcatctgtgggagccgtgaggctcaaccatgaatctgacagtacgggcgaaacccgacaggacttaaagatccccaccgtttccggcgggtcgctccctcttgcgctctcctgttccgaccctgccgtttaccggatacctgttccgcctttctcccttacgggaagtgtggcgctttctcatagctcacacactggtatctcggctcggtgtaggtcgttcgctccaagctgggctgtaagcaagaactccccgttcagcccgactgctgcgccttatccggtaactgttcacttgagtccaacccggaaaagcacggtaaaacgccactggcagcagccattggtaactgggagttcgcagaggatttgtttagctaaacacgcggttgctcttgaagtgtgcgccaaagtccggctacactggaaggacagatttggttgctgtgctctgcgaaagccagttaccacggttaagcagttccccaactgacttaaccttcgatcaaaccacctccccaggtggttttttcgtttacagggcaaaagattacgcgcagaaaaaaaggatctcaagaagatcctttgatc

SEQ ID NO: 19 - DNA, 17479 bp, synthetic construct
  source 1..17479: mol_type = other DNA
ccccccccactctattgtaaacaagacatttttatcttttatattcaatggcttattttcctgctaattggtaataccatgaaaaataccatgctcagaaaaggcttaacaatattttgaaaaattgcctactgagcgctgccgcacagctccataggccgctttcctggctttgcttccagatgtatgctcttctgctcccgaacgccagcaagacgtagcccagcgcgtcggccagcttgcaattcgcgctaacttacattaattgcgttgcgctcactgcccgctttccagtcgggaaacctgtcgtgccagctgcattaatgaatcggccaacgcgcggggagaggcggtttgcgtattgggcgccagggtggtttttcttttcaccagtgagacgggcaacagctgattgcccttcaccgcctggccctgagagagttgcagcaagcggtccacaaggctctcaagggcatcggtcgcacgcttgtgttgacagctagctcagtcctaggtataatactagtcacgtgaactgccgagtaggtagctgataacgagacctctgtcttgtcagctagggtggtctcgtgaactgccgagtaggtagctgataactcgagagatccggctgctaacaaacccgcttaaggaagatggccaacttatttacataaggctgctgccaccgctgagcaataactagcataaccccttggggcctctaaacgggtcttgaggggttttttggtttaaacccatctaattgggaattccccctgcctcgcgcgtttcggtgatgacggtgaaaacctctgacacagcgatcgcttaattaattatgacaacttgacggctacatcattcactttttcttcacaaccggcacggaactcgctcgggctggccccggtgcattttttaaatacccgcgagaaatagagttgatcgtcaaaaccaacattgcgaccgacggtggcgataggcatccgggtggtgctcaaaagcagcttcgcctggctgatacgttggtcctcgcgccagcttaagacgctaatccctaactgctggcggaaaagatgtgacagacgcgacggcgacaagcaaacatgctgtgcgacgctggcgatatcaaaattgctgtctgccaggtgatcgctgatgtactgacaagcctcgcgtacccgattatccatcggtggatggagcgactcgttaatcgcttccatgcgccgcagtaacaattgctcaagcagatttatcgccagcagctccgaatagcgcccttccccttgcccggcgttaatgatttgcccaaacaggtcgctgaaatgcggctggtgcgcttcatccgggcgaaagaaccccgtattggcaaatattgacggccagttaagccattcatgccagtaggcgcgcggacgaaagtaaacccactggtgataccattcgcgagcctccggatgacgaccgtagtgatgaatctctcctggcgggaacagcaaaatatcacccggtcggcaaacaaattctcgtccctgatttttcaccaccccctgaccgcgaatggtgagattgagaatataacctttcattcccagcggtcggtcgataaaaaaatcgagataaccgttggcctcaatcggcgttaaacccgccaccagatgggcattaaacgagtatcccggcagcaggggatcattttgcgcttcagccatacttttcatactcccgccattcagagaagaaaccaattgtccatattgcatcagacattgccgtcactgcgtcttttactggctcttctcgctaaccaaaccggtaaccccgcttattaaaagcattctgtaacaaagcgggaccaaagccatgacaaaaacgcgtaacaaaagtgtctataatcacggcagaaaagtccacattgattatttgcacggcgtcacactttgctatgccatagcatttttatccataagattagcggatcctacctgacgctttttatcgcaactctctactgtttctccatacccgggatccgaattcgagcgaaggagatatacatatgtttttgcaaagacctaaaccttacagcgatgaaagtttagaaagtttctttatccgagtggctaacaaaaatggctacggtgatgtccatcgcttcctagaagccactaaacgattccttcaagacattgaccataatggctatcaaacctttccgactgatataactcggataaacccatactcagctaaaaacagttccagcgcacgaactgcgtcattcctgaaacttgcacaattgacatttaatgaaccgccagagctacttgggttggcaattaacagaacaaacatgaaatactcgccgtcaactagcgcggttgttagaggtgcagaagtctttcctcgcagtttactacggacgcactccatcccctgctgtcctttgtgtctgcgagaaaatggctacgcctcctacctttggcactttcaggggtacgaatactgccacagccataacgtacctttaattaccacttgtagctgtggtaaggagtttgactaccgagtatctgggttaaagggcatttgctgcaaatgcaaggagcctatcaccttaaccagcagggagaacggtcatgaggcagcgtgtactgtttcaaactggcttgctggccatgaatctaaacctctgccaaatcttcctaaaagctaccgatggggtttagttcattggtggatgggtattaaagatagcgagttcgatcacttttcgttcgttcaatttttctcaaactggccaaggtcattccactcgataatcgaagatgaagtagagttcaaccttgagcatgctgttgtcagcacgtctgaattacgactaaaagatcttcttggtcgattgtttttcggttcaattcggttacctgagcggaatcttcaacacaatatcatccttggtgagcttctctgctatttagaaaatcgtttatggcaagacaagggattaatcgccaacctcaaaatgaacgcgttagaggcgactgtaatgttaaattgtagcctcgatcagattgcatcaatggttgaacaacgcatcttgaagccaaatcgaaaaagcaagcccaacagccctcttgatgttaccgattatctatttcatttcggcgatattttctgtctttggttagctgagttccaaagcgatgagtttaaccgttcgttttatgtgtcgaggtggtaaatgcaaactctgaaagaactaatcgcatccaatcctgacgacttaacaactgaacttaagagagcatttcgtccactcacaccgcatattgcaattgatggtaatgaacttgacgcactgacgatattagtcaatttaaccgataagactgatgatcagaaagacctgctcgatcgagccaaatgcaagcaaaaacttcgagatgaaaaatggtgggctagctgcataaattgcgttaattacagacaaagccataacccaaaattcccggatatacgttctgaaggcgtgattcgaacccaagccctgggtgaattaccgagtttcctactctcgtcctcaaaaatcccaccataccattggtcatatagccatgattcaaaatacgtcaacaaaagcgcattcctcaccaatgagttttgttgggatggtgagatctcatgtttgggtgagcttcttaaagatgcagatcacccactttggaatactttgaaaaagttaggttgttctcaaaaaacttgcaaagcaatggcaaaacaactagctgatattactctcacgactatcaatgtcacactcgcaccaaattacctgactcaaatatctctccccgatagtgatacatcctacatttcactctctcctgttgcatcgctatcgatgcaaagccactttcatcagaggctccaagatgaaaatcggcatagcgcgataacgcggtttagccgaactaccaacatgggggtcactgcgatgacatgtggcggcgcatttagaatgttaaagtctggcgctaagttttccagcccccctcatcaccgattaaacagtaaacgaagttggttgacgtcagagcatgttcagtcattaaaacagtaccagcgcctcaacaaaagcctcatacctgaaaactctcggattgcactccgtagaaaatacaaaatcgagcttcaaaatatggtcagatcttggtttgcaatgcaagaccatacccttgattcgaacatacttatccaacatttgaatcatgacctatcttacttaggagccacaaaacgttttgcatacgatccagcgatgaccaagctctttactgagcttttgaaacgagagttatcaaattcaatcaataatggtgagcaacacactaatggatcgtttttagtcctaccgaatatcagggtttgtggcgcaacagctttaagctccccggtaacggtggggattccatcacttacagctttctttggcttcgttcacgcatttgaacggaatataaatcgcaccacctcatcgtttcgtgttgaatcctttgcgatatgcgtccatcaactacatgtcgagaagcgaggtttgacagcagagtttgtggaaaaaggcgacgggactatatccgctcccgcgacccgggatgactggcagtgtgatgtcgtatttagccttattttgaacaccaactttgctcaacatattgaccaagatacgttagttacatcactaccaaagcgattggctcggggttcagcaaaaattgcgattgatgactttaaacatatcaactcattctcgacattagaaacagcgatcgaatctctgccaatagaagctggtaggtggttatcactttacgcacagtcaaacaataatctaagtgatctattagcagccatgacagaggaccatcagctcatggcaagctgcgtcggttaccacttgttagaagagcccaaagataaaccaaactccctcagaggttacaaacacgctatcgccgagtgcatcattggactcattaactcaatcacctttagctcagagactgatcccaacacaatcttttggtcgctaaagaactatcaaaactacctagtggtacagccaaggagtatcaacgatgaaactaccgacaaatctagcctatgagcgctctatcgacccatcagatgtctgtttttttgtcgtctggcccgatgatagaaaaacacctttaacctacaattctcgtactctgctcgggcaaatggaagcggcatcattagcctatgatgtctcaggtcaaccaataaaaagtgccaccgctgaggcgttagctcaagggaaccctcatcaagttgatttctgccacgttccatacggtgcgagtcatattgaatgcagtttctccgtctcgttttcttctgaactacgtcaaccatataagtgtaactcaagcaaagttaaacaaacgctagtgcaattagtcgagctctacgaaacgaaaatcggctggactgagctagcaacccgatatttgatgaacatttgcaacggtaaatggctgtggaaaaatacccgtaaagcctattgctggaacattgtacttacaccttggccttggaacggggaaaaggttggatttgaagatattcgtactaactacacctcacggcaagactttaaaaataataaaaattggtctgctatagttgaaatgatcaaaaccgcattttctagtactgatgggctggcgatatttgaagtcagggccaccttgcacttgccaacgaatgctatggtgcggccaagccaagttttcacagaaaaagaaagtggcagtaaaagtaaatctaaaactcaaaacagtcgagtttttcagagtacaactattgatggtgaacgatcgccaatactaggggcctttaaaacgggagcagctattgcaaccattgacgactggtatcctgaagccactgagccactaagggtcggacggtttggggttcatcgcgaagatgtcacttgctaccgtcatccgtctaccggaaaagattttttctcgatattacaacaagcagagcactatattgaagtgttgagcgccaacaaaactcccgctcaagaaactatcaacgacatgcactttttaatggctaacctgattaagggtgggatgttccagcataaaggagactgactgtgaaatggtattataagacaatcacctttctgccagagttgtgcaacaacgagtcactggctgcaaagtgtctccgcgttctgcatggatttaactatcagtatgagacacgaaatatcggcgtttcatttccgctttggtgtgatgcaacggttggaaaaaagatttcatttgtcagcaagaacaagatagaactcgacttactacttaaacaacactatttcgtccaaatggaacaacttcaatactttcatatatccaacactgttctcgtcccagaagattgtacatacgtttcctttagacgctgtcaatctatagataagctcacagcagcagggctggcaaggaaaatcagacgcctggagaaacgtgctctatctagaggcgagcaatttgacccatcatcttttgctcaaaaagagcatactgcaatagcgcactaccactcacttggggagtccagcaaacagacgaaccgcaactttcgactcaatatcaggatgctctcggagcaaccccgtgaggggaactcgatttttagtagctatggcttatcaaattcagaaaactcgtttcagcctgtacccttaatctgacctttaataaggagatataccatggcgacaagtttacctacgccctcagcaattacgacttcggcgttagagtatgcattccatactcccgctcgcaatctaacgaaatctcgcggaaaaaacattcatcgttatgtcagtgtaaagatgagtaagaggattacggtagaatctactctagagtgtgatgcctgctatcactttgattttgagccaagtattgttcgcttttgcgctcaaccgattcgatttttatattatctcaatggtcagtctcactcctatgttcctgactttctagttcaatttgataccaacgagtttgttctatatgaagtaaagtcagcttatgctaagaacaaacctgattttgatgttgaatgggaggcgaaagtaaaagcagcaactgaactagggctagaattggagcttgttgaagagagtgatattagggatacggttgtattaaataatcttaagcgcatgcatcgttatgcttcgaaagatgagctgaataacgtacataactctctcttaaaaataataaagtacaatggcgcccaatctgcaagatgcttgggagaacagttgggtttaaaaggccgaactgttttaccaattttgtgcgatttgctgtcaaggtgtttactcgatacacgtttggataagcctctatctcttgaatctcgatttgagttggccagttatggctaagaaagggttctcaagtttccatagaaaagcagtctcttcccaagatacgcttgaatcgatagagcttgtctctagcgctaattgtctagaaagtgttacgtatcaagatatatcagcatttcccgaaacaattgcggtagagattaatttccgattaagcattcttcgctttttagcgcgaaagtgcgaaaccattgtggccaaatcaattgaaccacatcgtgtagagctacagcaaaactatagtagaaaaatacccagtgcaataacgatatatcgatggtggcttgcttttcgaaaatcagactacaaccccattagcttagcacctaatatcaaggatagaggtaatagagagacaaaagtgtcaacagttgttgattctattatggaacaggcagttgaaagagttatatctggacgaaaagtcaatgttagctctgcatataaacgtgttcgacgaaaagttcgtcaatacaatctaactcatggaacgaaatacacgtatcctaagtacgaatctgtaagaaagcgagtaaaaaagaaaaccccatttgagttattagccgcagggaaaggggagagagtagctaagagagagtttcgccgaatgggaaaaaagatcctcacgtctagcgtgctagagagggttgaaatagatcacactgtcgttgacctttttgcagtacacgaagagtatcgaatcccattgggccgaccttggcttactcaattggttgattgttacagtaaagctgtaatcggtttttatttaggtttcgagcctcctagctatgtgtcggtttcccttgcacttaagaatgcaatacaacgcaaagatgacttaatctcctcgtatgaatcgatcgagaatgaatggctatgttatggcatcccagacctactcgtaactgataatggtaaagagtttttgtcgaaagcatttgatcaagcatgtgaatcactattgatcaatgtgcatcaaaataaagttgagacgcccgacaacaaacctcatgttgaacgtaactacgggactattaatacttctctgttagacgatttacctgggaaatccttcagccagtaccttcaaagagaagggtacgactctgtgggagaagctacccttacactcaatgagattagagaaatttacttaatttggttggtggatatttatcataaaaaacccaatcagagaggcactaattgtcctaatgttgcgtggaaaaagggttgtcaagaatgggaaccagaggagttctctggttctaaagacgaattagactttaaatttgctattgttgattacaaacaacttactaaagtagggataactgtctacaaagaactgagttatagcaatgaccgtttagctgaatatagagggaagaaaggaaaccataaagttcagttcaagtataaccctgagtgtatggcagttatttgggtgttggatgaggatatgaatgagtactttacagttaatgcgattgactacgaatatgcaagtagagtatcactttggcaacataaatataacatgaaatatcaagcagaactaaattcagcagaatatgatgaggacaaggaaattgatgcagaaataaaaattgaagaaatcgcagatcgttcaattgttaagactaacaaaatcagagctcggaggcgtggcgctaggcatcaagagaatagcgcaagggctaagtcaatcagtaatgcgaacccggcctcgatacaaaaacatgaagatgaaatcgttagtgcagataatgacgattgggatattgattatgtctgagaaatcgtcaaatgagtgaaacgcgtgaggctcgtatatcaagagctaaaagggcatttgtatccacaccgagcgttaggaaaatcttgagttacatggatagatgtagagatctatcagacctagagtctgagcctacatgcatgatggtctatggtgcttcgggtgtaggtaaaacgaccgtcatcaagaaatacttaaatcaaaacagaagagagtccgaagccgggggcgatataataccggttttgcatattgagttgccagacaatgcgaagccagtagatgcagcaagggaattgctggttgaaatgggtgacccgctagcactttatgaaactgacttagctagattgacgaaaagactgactgaattaatccctgcggtcggcgtgaagctgattattatcgatgagttccaacatttggtggaagaaaggtcaaatcgggttcttacccaagtaggtaattggctaaaaatgatacttaacaaaacgaaatgtccaattgttatatttggtatgccatactcaaaagttgtactgcaagcaaactcgcaacttcacgggcgattttccattcaggttgaactgcgcccctttagctaccagggaggtagaggtgtatttaaaacttttttggaataccttgataaagccctaccttttgaaaaacaggctggcttagccaacgaaagtttgcagaaaaaattgtatgcattctctcagggaaacatgcgttcgttgagaaaccttatttatcaagcatctatcgaagcaattgataatcagcatgagacgataaccgaagaagatttcgtttttgcatcgaagttgacatcgggcgataaacccaactcatggaaaaatccttttgaggagggtgttgaggtaacagaagatatgttacgaccgccaccaaaagatattggttgggaggactatttgagacattcaaccccgagagtgagtaaaccaggtagaaataaaaactttttcgaataacctaggctgctgcgctgctgccaccgctgagcaataactagcataaccccttggggcctctaaacgggtcttgaggggttttttgtctagagtcgacctgcaggcatgcaagcttggctgttttggcggatgagagaagattttcagcctgatacagattaaatcagaacgcagaagcggtctgataaaacagaatttgcctggcggcagtagcgcggtggtcccacctgaccccatgccgaactcagaagtgaaacgccgtagcgccgatggtagtgtggggtctccccatgcgagagtagggaactgccaggcatcaaataaaacgaaaggctcagtcgaaagactgggcctttcgttttatctgttgtttgtcggtgaacgctctcctgagtaggacaaatccgccgggagcggatttgaacgttgcgaagcaacggcccggagggtggcgggcaggacgcccgccataaactgccaggcatcaaattaagcagaaggccatcctgacggatggcctttttgcgtttctacaaactcttttgtttatttttctaaatacattcaaatatgtatccgctcatgagacaataaccctgataaatgcttcaataatattgaaaaaggaagagtatgagtattcaacatttccgtgtcgcccttattcccttttttgcggcattttgccttcctgtttttgctcacccagaaacgctggtgaaagtaaaagatgctgaagatcagttgggtgcacgagtgggttacatcgaactggatctcaacagcggtaagatccttgagagttttcgccccgaagaacgttttccaatgatgagcacttttaaagttctgctatgtggcgcggtattatcccgtgttgacgccgggcaagagcaactcggtcgccgcatacactattctcagaatgacttggttgagtactcaccagtcacagaaaagcatcttacggatggcatgacagtaagagaattatgcagtgctgccataaccatgagtgataacactgcggccaacttacttctgacaacgatcggaggaccgaaggagctaaccgcttttttgcacaacatgggggatcatgtaactcgccttgatcgttgggaaccggagctgaatgaagccataccaaacgacgagcgtgacaccacgatgcctgtagcaatggcaacaacgttgcgcaaactattaactggcgaactacttactctagcttcccggcaacaattaatagactggatggaggcggataaagttgcaggaccacttctgcgctcggcccttccggctggctggtttattgctgataaatctggagccggtgagcgtgggtctcgcggtatcattgcagcactggggccagatggtaagccctcccgtatcgtagttatctacacgacggggagtcaggcaactatggatgaacgaaatagacagatcgctgagataggtgcctcactgattaagcattggtaactgtcagaccaagtttactcatatatactttagattgatttctgaaagcgaccaggtgctcggcgtggcaagactcgcagcgaacccgtagaaagccatgctccagccgcccgcattggagaaattcttcaaattcccgttgcacatagcccggcaattcctttccctgctctgccataagcgcagcgaatgccgggtaatactcgtcaacgatctgatagagaagggtttgctcgggtcggtggctctggtaacgaccagtatcccgatcccggctggccgtcctggccgccacatgaggcatgttccgcgtccttgcaatactgtgtttacatacagtctatcgcttagcggaaagttcttttaccctcagccgaaatgcctgccgttgctagacattgccagccagtgcccgtcactcccgtactaactgtcacgaacccctgcaataactgtcacgcccccctgcaataactgtcacgaacccctgcaataactgtcacgcccccaaacctgcaaacccagcaggggcgggggctggcggggtgttggaaaaatccatccatgattatctaagaataatccactaggcgcggttatcagcgcccttgtggggcgctgctgcccttgcccaatatgcccggccagaggccggatagctggtctattcgctgcgctaggctacacaccgccccaccgctgcgcggcagggggaaaggcgggcaaagcccgctaaaccccacaccaaaccccgcagaaatacgctggagcgcttttagccgctttagcggcctttccccctacccgaagggtgggggcgcgtgtgcagccccgcagggcctgtctcggtcgatcattcagcccggctcatccttctggcgtggcggcagaccgaacaaggcgcggtcgtggtcgcgttcaaggtacgcatccattgccgccatgagccgatcctccggccactcgctgctgttcaccttggccaaaatcatggcccccaccagcaccttgcgccttgtttcgttcttgcgctcttgctgctgttcccttgcccgctcccgctgaatttcggcattgattcgcgctcgttgttcttcgagcttggccagccgatccgccgccttgttgctccccttaaccatcttgacaccccattgttaatgtgctgtctcgtaggctatcatggaggcacagcggcggcaatcccgaccctactttgtaggggagggcgcacttaccggtttctcttcgagaaactggcctaacggccacccttcgggcggtgcgctctccgagggccattgcatggagccgaaaagcaaaagcaacagcgaggcagcatggcgatttatcaccttacggcgaaaaccggcagcaggtcgggcggccaatcggccagggccaaggccgactacatccagcgcgaaggcaagtatgcccgcgacatggatgaagtcttgcacgccgaatccgggcacatgccggagttcgtcgagcggcccgccgactactgggatgctgccgacctgtatgaacgcgccaatgggcggctgttcaaggaggtcgaatttgccctgccggtcgagctgaccctcgaccagcagaaggcgctggcgtccgagttcgcccagcacctgaccggtgccgagcgcctgccgtatacgctggccatccatgccggtggcggcgagaacccgcactgccacctgatgatctccgagcggatcaatgacggcatcgagcggcccgccgctcagtggttcaagcggtacaacggcaagaccccggagaagggcggggcacagaagaccgaagcgctcaagcccaaggcatggcttgagcagacccgcgaggcatgggccgaccatgccaaccgggcattagagcgggctggccacgacgcccgcattgaccacagaacacttgaggcgcagggcatcgagcgcctgcccggtgttcacctggggccgaacgtggtggagatggaaggccggggcatccgcaccgaccgggcagacgtggccctgaacatcgacaccgccaacgcccagatcatcgacttacaggaataccgggaggcaatagaccatgaacgcaatcgacagagtgaagaaatccagaggcatcaacgagttagcggagcagatcgaaccgctggcccagagcatggcgacactggccgacgaagcccggcaggtcatgagccagaccaagcaggccagcgaggcgcaggcggcggagtggctgaaagcccagcgccagacaggggcggcatgggtggagctggccaaagagttgcgggaggtagccgccgaggtgagcagcgccgcgcagagcgcccggagcgcgtcgcgggggtggcactggaagctatggctaaccgtgatgctggcttccatgatgcctacggtggtgctgctgatcgcatcgttgctcttgctcgacctgacgccactgacaaccgaggacggctcgatctggctgcgcttggtggcccgatgaagaacgacaggactttgcaggccataggccgacagctcaaggccatgggctgtgagcgcttcgatatcggcgtcagggacgcacccaccggccagatgatgaaccgggaatggtcagccgccgaagtgctccagaacacgccatggctcaagcggatgaatgcccagggcaatgacgtgtatatcaggcccgccgagcaggagcggcatggtctggtgctggtggacgacctcagcgagtttgacctggatgacatgaaagccgagggccgggagcctgccctggtagtggaaaccagcccgaagaactatcaggcatgggtcaaggtggccgacgccgcaggcggtgaacttcgggggcagattgcccggacgctggccagcgagtacgacgccgacccggccagcgccgacagccgccactatggccgcttggcgggcttcaccaaccgcaaggacaagcacaccacccgcgccggttatcagccgtgggtgctgctgcgtgaatccaagggcaagaccgccaccgctggcccggcgctggtgcagcaggctggccagcagatcgagcaggcccagcggcagcaggagaaggcccgcaggctggccagcctcgaactgcccgagcggcagcttagccgccaccggcgcacggcgctggacgagtaccgcagcgagatggccgggctggtcaagcgcttcggtcatgacctcagcaagtgcgactttatcgccgcgcagaagctggccagccggggccgcagtgccgaggaaatcggcaaggccatggccgaggccagcccagcgctggcagagcgcaagcccggccacgaagcggattacatcgagcgcaccgtcagcaaggtcatgggtctgcccagcgtccagcttgcgcgggccgagctggcacgggcaccggcaccccgccagcgaggcatggacaggggcgggccagatttcagcatgtagtgcttgcgttggtactcacgcctgttatactatgagtactcacgcacagaagggggttttatggaatacgaaaaaagcgcttcagggtcggtctacctgatcaaaagtgacaagggctattggttgcccggtggctttggttatacgtcaaacaaggccgaggctggccgcttttcagtcgctgatatggccagccttaaccttgacggctgcaccttgtccttgttccgcgaagacaagcctttcggccccggcaagtttctcggtgactgatatgaaagaccaaaaggacaagcagaccggcgacctgctggccagccctgacgctgtacgccaagcgcgatatgccgagcgcatgaaggccaaagggatgcgtcagcgcaagttctggctgaccgacgacgaatacgaggcgctgcgcgagtgcctggaagaactcagagcggcgcagggcgggggtagtgaccccgccagcgcctaaccaccaactgcctgcaaaggaggcaatcaatggctacccataagcctatcaatattctggaggcgttcgcagcagcgccgccaccgctggactacgttttgcccaacatggtggccggtacggtcggggcgctggtgtcgcccggtggtgccggtaaatccatgctggccctgcaactggccgcacagattgcaggcgggccggatctgctggaggtgggcgaactgcccaccggcccggtgatctacctgcccgccgaagacccgcccaccgccattcatcaccgcctgcacgcccttggggcgcacctcagcgccgaggaacggcaagccgtggctgacggcctgctgatccagccgctgatcggcagcctgcccaacatcatggccccggagtggttcgacggcctcaagcgcgccgccgagggccgccgcctgatggtgctggacacgctgcgccggttccacatcgaggaagaaaacgccagcggccccatggcccaggtcatcggtcgcatggaggccatcgccgccgataccgggtgctctatcgtgttcctgcaccatgccagcaagggcgcggccatgatgggcgcaggcgaccagcagcaggccagccggggcagctcggtactggtcgataacatccgctggcagtcctacctgtcgagcatgaccagcgccgaggccgaggaatggggtgtggacgacgaccagcgccggttcttcgtccgcttcggtgtgagcaaggccaactatggcgcaccgttcgctgatcggtggttcaggcggcatgacggcggggtgctcaagcccgccgtgctggagaggcagcgcaagagcaagggggtgccccgtggtgaagcctaagaacaagcacagcctcagccacgtccggcacgacccggcgcactgtctggcccccggcctgttccgtgccctcaagcggggcgagcgcaagcgcagcaagctggacgtgacgtatgactacggcgacggcaagcggatcgagttcagcggcccggagccgctgggcgctgatgatctgcgcatcctgcaagggctggtggccatggctgggcctaatggcctagtgcttggcccggaacccaagaccgaaggcggacggcagctccggctgttcctggaacccaagtgggaggccgtcaccgctgaatgccatgtggtcaaaggtagctatcgggcgctggcaaaggaaatcggggcagaggtcgatagtggtggggcgctcaagcacatacaggactgcatcgagcgcctttggaaggtatccatcatcgcccagaatggccgcaagcggcaggggtttcggctgctgtcggagtacgccagcgacgaggcggacgggcgcctgtacgtggccctgaaccccttgatcgcgcaggccgtcatgggtggcggccagcatgtgcgcatcagcatggacgaggtgcgggcgctggacagcgaaaccgcccgcctgctgcaccagcggctgtgtggctggatcgaccccggcaaaaccggcaaggcttccatagataccttgtgcggctatgtctggccgtcagaggccagtggttcgaccatgcgcaagcgccgcaagcgggtgcgcgaggcgttgccggagctggtcgcgctgggctggacggtaaccgagttcgcggcgggcaagtacgacatcacccggcccaaggcggcaggctga

SEQ ID NO: 20 - DNA, 16860 bp, synthetic construct
  source 1..16860: mol_type = other DNA
ccccccccactctattgtaaacaagacatttttatcttttatattcaatggcttattttcctgctaattggtaataccatgaaaaataccatgctcagaaaaggcttaacaatattttgaaaaattgcctactgagcgctgccgcacagctccataggccgctttcctggctttgcttccagatgtatgctcttctgctcccgaacgaaggctctcaagggcatcggtcgcacgcttgtgttgacagctagctcagtcctaggtataatactagtcacgtgaactgccgagtaggtagctgataacaaaaccatgcaggcagttaaagacatcacgcagtgaactgccgagtaggtagctgataactcgagagatccggctgctaacaaacccgcttaaggaagatggccaacttatttacataaggctgctgccaccgctgagcaataactagcataaccccttggggcctctaaacgggtcttgaggggttttttggtttaaacccatctaattgggaattccccctgcctcgcgcgtttcggtgatgacggtgaaaacctctgacacagcgatcgcttatgacaacttgacggctacatcattcactttttcttcacaaccggcacggaactcgctcgggctggccccggtgcattttttaaatacccgcgagaaatagagttgatcgtcaaaaccaacattgcgaccgacggtggcgataggcatccgggtggtgctcaaaagcagcttcgcctggctgatacgttggtcctcgcgccagcttaagacgctaatccctaactgctggcggaaaagatgtgacagacgcgacggcgacaagcaaacatgctgtgcgacgctggcgatatcaaaattgctgtctgccaggtgatcgctgatgtactgacaagcctcgcgtacccgattatccatcggtggatggagcgactcgttaatcgcttccatgcgccgcagtaacaattgctcaagcagatttatcgccagcagctccgaatagcgcccttccccttgcccggcgttaatgatttgcccaaacaggtcgctgaaatgcggctggtgcgcttcatccgggcgaaagaaccccgtattggcaaatattgacggccagttaagccattcatgccagtaggcgcgcggacgaaagtaaacccactggtgataccattcgcgagcctccggatgacgaccgtagtgatgaatctctcctggcgggaacagcaaaatatcacccggtcggcaaacaaattctcgtccctgatttttcaccaccccctgaccgcgaatggtgagattgagaatataacctttcattcccagcggtcggtcgataaaaaaatcgagataaccgttggcctcaatcggcgttaaacccgccaccagatgggcattaaacgagtatcccggcagcaggggatcattttgcgcttcagccatacttttcatactcccgccattcagagaagaaaccaattgtccatattgcatcagacattgccgtcactgcgtcttttactggctcttctcgctaaccaaaccggtaaccccgcttattaaaagcattctgtaacaaagcgggaccaaagccatgacaaaaacgcgtaacaaaagtgtctataatcacggcagaaaagtccacattgattatttgcacggcgtcacactttgctatgccatagcatttttatccataagattagcggatcctacctgacgctttttatcgcaactctctactgtttctccatacccgggatccgaattcgagcgaaggagatatacatatgtttttgcaaagacctaaaccttacagcgatgaaagtttagaaagtttctttatccgagtggctaacaaaaatggctacggtgatgtccatcgcttcctagaagccactaaacgattccttcaagacattgaccataatggctatcaaacctttccgactgatataactcggataaacccatactcagctaaaaacagttccagcgcacgaactgcgtcattcctgaaacttgcacaattgacatttaatgaaccgccagagctacttgggttggcaattaacagaacaaacatgaaatactcgccgtcaactagcgcggttgttagaggtgcagaagtctttcctcgcagtttactacggacgcactccatcccctgctgtcctttgtgtctgcgagaaaatggctacgcctcctacctttggcactttcaggggtacgaatactgccacagccataacgtacctttaattaccacttgtagctgtggtaaggagtttgactaccgagtatctgggttaaagggcatttgctgcaaatgcaaggagcctatcaccttaaccagcagggagaacggtcatgaggcagcgtgtactgtttcaaactggcttgctggccatgaatctaaacctctgccaaatcttcctaaaagctaccgatggggtttagttcattggtggatgggtattaaagatagcgagttcgatcacttttcgttcgttcaatttttctcaaactggccaaggtcattccactcgataatcgaagatgaagtagagttcaaccttgagcatgctgttgtcagcacgtctgaattacgactaaaagatcttcttggtcgattgtttttcggttcaattcggttacctgagcggaatcttcaacacaatatcatccttggtgagcttctctgctatttagaaaatcgtttatggcaagacaagggattaatcgccaacctcaaaatgaacgcgttagaggcgactgtaatgttaaattgtagcctcgatcagattgcatcaatggttgaacaacgcatcttgaagccaaatcgaaaaagcaagcccaacagccctcttgatgttaccgattatctatttcatttcggcgatattttctgtctttggttagctgagttccaaagcgatgagtttaaccgttcgttttatgtgtcgaggtggtaaatgcaaactctgaaagaactaatcgcatccaatcctgacgacttaacaactgaacttaagagagcatttcgtccactcacaccgcatattgcaattgatggtaatgaacttgacgcactgacgatattagtcaatttaaccgataagactgatgatcagaaagacctgctcgatcgagccaaatgcaagcaaaaacttcgagatgaaaaatggtgggctagctgcataaattgcgttaattacagacaaagccataacccaaaattcccggatatacgttctgaaggcgtgattcgaacccaagccctgggtgaattaccgagtttcctactctcgtcctcaaaaatcccaccataccattggtcatatagccatgattcaaaatacgtcaacaaaagcgcattcctcaccaatgagttttgttgggatggtgagatctcatgtttgggtgagcttcttaaagatgcagatcacccactttggaatactttgaaaaagttaggttgttctcaaaaaacttgcaaagcaatggcaaaacaactagctgatattactctcacgactatcaatgtcacactcgcaccaaattacctgactcaaatatctctccccgatagtgatacatcctacatttcactctctcctgttgcatcgctatcgatgcaaagccactttcatcagaggctccaagatgaaaatcggcatagcgcgataacgcggtttagccgaactaccaacatgggggtcactgcgatgacatgtggcggcgcatttagaatgttaaagtctggcgctaagttttccagcccccctcatcaccgattaaacagtaaacgaagttggttgacgtcagagcatgttcagtcattaaaacagtaccagcgcctcaacaaaagcctcatacctgaaaactctcggattgcactccgtagaaaatacaaaatcgagcttcaaaatatggtcagatcttggtttgcaatgcaagaccatacccttgattcgaacatacttatccaacatttgaatcatgacctatcttacttaggagccacaaaacgttttgcatacgatccagcgatgaccaagctctttactgagcttttgaaacgagagttatcaaattcaatcaataatggtgagcaacacactaatggatcgtttttagtcctaccgaatatcagggtttgtggcgcaacagctttaagctccccggtaacggtggggattccatcacttacagctttctttggcttcgttcacgcatttgaacggaatataaatcgcaccacctcatcgtttcgtgttgaatcctttgcgatatgcgtccatcaactacatgtcgagaagcgaggtttgacagcagagtttgtggaaaaaggcgacgggactatatccgctcccgcgacccgggatgactggcagtgtgatgtcgtatttagccttattttgaacaccaactttgctcaacatattgaccaagatacgttagttacatcactaccaaagcgattggctcggggttcagcaaaaattgcgattgatgactttaaacatatcaactcattctcgacattagaaacagcgatcgaatctctgccaatagaagctggtaggtggttatcactttacgcacagtcaaacaataatctaagtgatctattagcagccatgacagaggaccatcagctcatggcaagctgcgtcggttaccacttgttagaagagcccaaagataaaccaaactccctcagaggttacaaacacgctatcgccgagtgcatcattggactcattaactcaatcacctttagctcagagactgatcccaacacaatcttttggtcgctaaagaactatcaaaactacctagtggtacagccaaggagtatcaacgatgaaactaccgacaaatctagcctatgagcgctctatcgacccatcagatgtctgtttttttgtcgtctggcccgatgatagaaaaacacctttaacctacaattctcgtactctgctcgggcaaatggaagcggcatcattagcctatgatgtctcaggtcaaccaataaaaagtgccaccgctgaggcgttagctcaagggaaccctcatcaagttgatttctgccacgttccatacggtgcgagtcatattgaatgcagtttctccgtctcgttttcttctgaactacgtcaaccatataagtgtaactcaagcaaagttaaacaaacgctagtgcaattagtcgagctctacgaaacgaaaatcggctggactgagctagcaacccgatatttgatgaacatttgcaacggtaaatggctgtggaaaaatacccgtaaagcctattgctggaacattgtacttacaccttggccttggaacggggaaaaggttggatttgaagatattcgtactaactacacctcacggcaagactttaaaaataataaaaattggtctgctatagttgaaatgatcaaaaccgcattttctagtactgatgggctggcgatatttgaagtcagggccaccttgcacttgccaacgaatgctatggtgcggccaagccaagttttcacagaaaaagaaagtggcagtaaaagtaaatctaaaactcaaaacagtcgagtttttcagagtacaactattgatggtgaacgatcgccaatactaggggcctttaaaacgggagcagctattgcaaccattgacgactggtatcctgaagccactgagccactaagggtcggacggtttggggttcatcgcgaagatgtcacttgctaccgtcatccgtctaccggaaaagattttttctcgatattacaacaagcagagcactatattgaagtgttgagcgccaacaaaactcccgctcaagaaactatcaacgacatgcactttttaatggctaacctgattaagggtgggatgttccagcataaaggagactgactgtgaaatggtattataagacaatcacctttctgccagagttgtgcaacaacgagtcactggctgcaaagtgtctccgcgttctgcatggatttaactatcagtatgagacacgaaatatcggcgtttcatttccgctttggtgtgatgcaacggttggaaaaaagatttcatttgtcagcaagaacaagatagaactcgacttactacttaaacaacactatttcgtccaaatggaacaacttcaatactttcatatatccaacactgttctcgtcccagaagattgtacatacgtttcctttagacgctgtcaatctatagataagctcacagcagcagggctggcaaggaaaatcagacgcctggagaaacgtgctctatctagaggcgagcaatttgacccatcatcttttgctcaaaaagagcatactgcaatagcgcactaccactcacttggggagtccagcaaacagacgaaccgcaactttcgactcaatatcaggatgctctcggagcaaccccgtgaggggaactcgatttttagtagctatggcttatcaaattcagaaaactcgtttcagcctgtacccttaatctgacctttaataaggagatataccatggcgacaagtttacctacgccctcagcaattacgacttcggcgttagagtatgcattccatactcccgctcgcaatctaacgaaatctcgcggaaaaaacattcatcgttatgtcagtgtaaagatgagtaagaggattacggtagaatctactctagagtgtgatgcctgctatcactttgattttgagccaagtattgttcgcttttgcgctcaaccgattcgatttttatattatctcaatggtcagtctcactcctatgttcctgactttctagttcaatttgataccaacgagtttgttctatatgaagtaaagtcagcttatgctaagaacaaacctgattttgatgttgaatgggaggcgaaagtaaaagcagcaactgaactagggctagaattggagcttgttgaagagagtgatattagggatacggttgtattaaataatcttaagcgcatgcatcgttatgcttcgaaagatgagctgaataacgtacataactctctcttaaaaataataaagtacaatggcgcccaatctgcaagatgcttgggagaacagttgggtttaaaaggccgaactgttttaccaattttgtgcgatttgctgtcaaggtgtttactcgatacacgtttggataagcctctatctcttgaatctcgatttgagttggccagttatggctaagaaagggttctcaagtttccatagaaaagcagtctcttcccaagatacgcttgaatcgatagagcttgtctctagcgctaattgtctagaaagtgttacgtatcaagatatatcagcatttcccgaaacaattgcggtagagattaatttccgattaagcattcttcgctttttagcgcgaaagtgcgaaaccattgtggccaaatcaattgaaccacatcgtgtagagctacagcaaaactatagtagaaaaatacccagtgcaataacgatatatcgatggtggcttgcttttcgaaaatcagactacaaccccattagcttagcacctaatatcaaggatagaggtaatagagagacaaaagtgtcaacagttgttgattctattatggaacaggcagttgaaagagttatatctggacgaaaagtcaatgttagctctgcatataaacgtgttcgacgaaaagttcgtcaatacaatctaactcatggaacgaaatacacgtatcctaagtacgaatctgtaagaaagcgagtaaaaaagaaaaccccatttgagttattagccgcagggaaaggggagagagtagctaagagagagtttcgccgaatgggaaaaaagatcctcacgtctagcgtgctagagagggttgaaatagatcacactgtcgttgacctttttgcagtacacgaagagtatcgaatcccattgggccgaccttggcttactcaattggttgattgttacagtaaagctgtaatcggtttttatttaggtttcgagcctcctagctatgtgtcggtttcccttgcacttaagaatgcaatacaacgcaaagatgacttaatctcctcgtatgaatcgatcgagaatgaatggctatgttatggcatcccagacctactcgtaactgataatggtaaagagtttttgtcgaaagcatttgatcaagcatgtgaatcactattgatcaatgtgcatcaaaataaagttgagacgcccgacaacaaacctcatgttgaacgtaactacgggactattaatacttctctgttagacgatttacctgggaaatccttcagccagtaccttcaaagagaagggtacgactctgtgggagaagctacccttacactcaatgagattagagaaatttacttaatttggttggtggatatttatcataaaaaacccaatcagagaggcactaattgtcctaatgttgcgtggaaaaagggttgtcaagaatgggaaccagaggagttctctggttctaaagacgaattagactttaaatttgctattgttgattacaaacaacttactaaagtagggataactgtctacaaagaactgagttatagcaatgaccgtttagctgaatatagagggaagaaaggaaaccataaagttcagttcaagtataaccctgagtgtatggcagttatttgggtgttggatgaggatatgaatgagtactttacagttaatgcgattgactacgaatatgcaagtagagtatcactttggcaacataaatataacatgaaatatcaagcagaactaaattcagcagaatatgatgaggacaaggaaattgatgcagaaataaaaattgaagaaatcgcagatcgttcaattgttaagactaacaaaatcagagctcggaggcgtggcgctaggcatcaagagaatagcgcaagggctaagtcaatcagtaatgcgaacccggcctcgatacaaaaacatgaagatgaaatcgttagtgcagataatgacgattgggatattgattatgtctgagaaatcgtcaaatgagtgaaacgcgtgaggctcgtatatcaagagctaaaagggcatttgtatccacaccgagcgttaggaaaatcttgagttacatggatagatgtagagatctatcagacctagagtctgagcctacatgcatgatggtctatggtgcttcgggtgtaggtaaaacgaccgtcatcaagaaatacttaaatcaaaacagaagagagtccgaagccgggggcgatataataccggttttgcatattgagttgccagacaatgcgaagccagtagatgcagcaagggaattgctggttgaaatgggtgacccgctagcactttatgaaactgacttagctagattgacgaaaagactgactgaattaatccctgcggtcggcgtgaagctgattattatcgatgagttccaacatttggtggaagaaaggtcaaatcgggttcttacccaagtaggtaattggctaaaaatgatacttaacaaaacgaaatgtccaattgttatatttggtatgccatactcaaaagttgtactgcaagcaaactcgcaacttcacgggcgattttccattcaggttgaactgcgcccctttagctaccagggaggtagaggtgtatttaaaacttttttggaataccttgataaagccctaccttttgaaaaacaggctggcttagccaacgaaagtttgcagaaaaaattgtatgcattctctcagggaaacatgcgttcgttgagaaaccttatttatcaagcatctatcgaagcaattgataatcagcatgagacgataaccgaagaagatttcgtttttgcatcgaagttgacatcgggcgataaacccaactcatggaaaaatccttttgaggagggtgttgaggtaacagaagatatgttacgaccgccaccaaaagatattggttgggaggactatttgagacattcaaccccgagagtgagtaaaccaggtagaaataaaaactttttcgaataacctaggctgctgcgctgctgccaccgctgagcaataactagcataaccccttggggcctctaaacgggtcttgaggggttttttgctgaaacctcaggcattgaacctgcacggtacgccaggcatcaaattaagcagaaggccatcctgacggatggcctttttgcgtttctacaaactcttttgtttatttttctaaatacattcaaatatgtatccgctcatgagacaataaccctgataaatgcttcaataatattgaaaaaggaagagtatgagtattcaacatttccgtgtcgcccttattcccttttttgcggcattttgccttcctgtttttgctcacccagaaacgctggtgaaagtaaaagatgctgaagatcagttgggtgcacgagtgggttacatcgaactggatctcaacagcggtaagatccttgagagttttcgccccgaagaacgttttccaatgatgagcacttttaaagttctgctatgtggcgcggtattatcccgtgttgacgccgggcaagagcaactcggtcgccgcatacactattctcagaatgacttggttgagtactcaccagtcacagaaaagcatcttacggatggcatgacagtaagagaattatgcagtgctgccataaccatgagtgataacactgcggccaacttacttctgacaacgatcggaggaccgaaggagctaaccgcttttttgcacaacatgggggatcatgtaactcgccttgatcgttgggaaccggagctgaatgaagccataccaaacgacgagcgtgacaccacgatgcctgtagcaatggcaacaacgttgcgcaaactattaactggcgaactacttactctagcttcccggcaacaattaatagactggatggaggcggataaagttgcaggaccacttctgcgctcggcccttccggctggctggtttattgctgataaatctggagccggtgagcgtgggtctcgcggtatcattgcagcactggggccagatggtaagccctcccgtatcgtagttatctacacgacggggagtcaggcaactatggatgaacgaaatagacagatcgctgagataggtgcctcactgattaagcattggtaactgtcagaccaagtttactcatatatactttagattgatttctgaaagcgaccaggtgctcggcgtggcaagactcgcagcgaacccgtagaaagccatgctccagccgcccgcattggagaaattcttcaaattcccgttgcacatagcccggcaattcctttccctgctctgccataagcgcagcgaatgccgggtaatactcgtcaacgatctgatagagaagggtttgctcgggtcggtggctctggtaacgaccagtatcccgatcccggctggccgtcctggccgccacatgaggcatgttccgcgtccttgcaatactgtgtttacatacagtctatcgcttagcggaaagttcttttaccctcagccgaaatgcctgccgttgctagacattgccagccagtgcccgtcactcccgtactaactgtcacgaacccctgcaataactgtcacgcccccctgcaataactgtcacgaacccctgcaataactgtcacgcccccaaacctgcaaacccagcaggggcgggggctggcggggtgttggaaaaatccatccatgattatctaagaataatccactaggcgcggttatcagcgcccttgtggggcgctgctgcccttgcccaatatgcccggccagaggccggatagctggtctattcgctgcgctaggctacacaccgccccaccgctgcgcggcagggggaaaggcgggcaaagcccgctaaaccccacaccaaaccccgcagaaatacgctggagcgcttttagccgctttagcggcctttccccctacccgaagggtgggggcgcgtgtgcagccccgcagggcctgtctcggtcgatcattcagcccggctcatccttctggcgtggcggcagaccgaacaaggcgcggtcgtggtcgcgttcaaggtacgcatccattgccgccatgagccgatcctccggccactcgctgctgttcaccttggccaaaatcatggcccccaccagcaccttgcgccttgtttcgttcttgcgctcttgctgctgttcccttgcccgctcccgctgaatttcggcattgattcgcgctcgttgttcttcgagcttggccagccgatccgccgccttgttgctccccttaaccatcttgacaccccattgttaatgtgctgtctcgtaggctatcatggaggcacagcggcggcaatcccgaccctactttgtaggggagggcgcacttaccggtttctcttcgagaaactggcctaacggccacccttcgggcggtgcgctctccgagggccattgcatggagccgaaaagcaaaagcaacagcgaggcagcatggcgatttatcaccttacggcgaaaaccggcagcaggtcgggcggccaatcggccagggccaaggccgactacatccagcgcgaaggcaagtatgcccgcgacatggatgaagtcttgcacgccgaatccgggcacatgccggagttcgtcgagcggcccgccgactactgggatgctgccgacctgtatgaacgcgccaatgggcggctgttcaaggaggtcgaatttgccctgccggtcgagctgaccctcgaccagcagaaggcgctggcgtccgagttcgcccagcacctgaccggtgccgagcgcctgccgtatacgctggccatccatgccggtggcggcgagaacccgcactgccacctgatgatctccgagcggatcaatgacggcatcgagcggcccgccgctcagtggttcaagcggtacaacggcaagaccccggagaagggcggggcacagaagaccgaagcgctcaagcccaaggcatggcttgagcagacccgcgaggcatgggccgaccatgccaaccgggcattagagcgggctggccacgacgcccgcattgaccacagaacacttgaggcgcagggcatcgagcgcctgcccggtgttcacctggggccgaacgtggtggagatggaaggccggggcatccgcaccgaccgggcagacgtggccctgaacatcgacaccgccaacgcccagatcatcgacttacaggaataccgggaggcaatagaccatgaacgcaatcgacagagtgaagaaatccagaggcatcaacgagttagcggagcagatcgaaccgctggcccagagcatggcgacactggccgacgaagcccggcaggtcatgagccagaccaagcaggccagcgaggcgcaggcggcggagtggctgaaagcccagcgccagacaggggcggcatgggtggagctggccaaagagttgcgggaggtagccgccgaggtgagcagcgccgcgcagagcgcccggagcgcgtcgcgggggtggcactggaagctatggctaaccgtgatgctggcttccatgatgcctacggtggtgctgctgatcgcatcgttgctcttgctcgacctgacgccactgacaaccgaggacggctcgatctggctgcgcttggtggcccgatgaagaacgacaggactttgcaggccataggccgacagctcaaggccatgggctgtgagcgcttcgatatcggcgtcagggacgcacccaccggccagatgatgaaccgggaatggtcagccgccgaagtgctccagaacacgccatggctcaagcggatgaatgcccagggcaatgacgtgtatatcaggcccgccgagcaggagcggcatggtctggtgctggtggacgacctcagcgagtttgacctggatgacatgaaagccgagggccgggagcctgccctggtagtggaaaccagcccgaagaactatcaggcatgggtcaaggtggccgacgccgcaggcggtgaacttcgggggcagattgcccggacgctggccagcgagtacgacgccgacccggccagcgccgacagccgccactatggccgcttggcgggcttcaccaaccgcaaggacaagcacaccacccgcgccggttatcagccgtgggtgctgctgcgtgaatccaagggcaagaccgccaccgctggcccggcgctggtgcagcaggctggccagcagatcgagcaggcccagcggcagcaggagaaggcccgcaggctggccagcctcgaactgcccgagcggcagcttagccgccaccggcgcacggcgctggacgagtaccgcagcgagatggccgggctggtcaagcgcttcggtcatgacctcagcaagtgcgactttatcgccgcgcagaagctggccagccggggccgcagtgccgaggaaatcggcaaggccatggccgaggccagcccagcgctggcagagcgcaagcccggccacgaagcggattacatcgagcgcaccgtcagcaaggtcatgggtctgcccagcgtccagcttgcgcgggccgagctggcacgggcaccggcaccccgccagcgaggcatggacaggggcgggccagatttcagcatgtagtgcttgcgttggtactcacgcctgttatactatgagtactcacgcacagaagggggttttatggaatacgaaaaaagcgcttcagggtcggtctacctgatcaaaagtgacaagggctattggttgcccggtggctttggttatacgtcaaacaaggccgaggctggccgcttttcagtcgctgatatggccagccttaaccttgacggctgcaccttgtccttgttccgcgaagacaagcctttcggccccggcaagtttctcggtgactgatatgaaagaccaaaaggacaagcagaccggcgacctgctggccagccctgacgctgtacgccaagcgcgatatgccgagcgcatgaaggccaaagggatgcgtcagcgcaagttctggctgaccgacgacgaatacgaggcgctgcgcgagtgcctggaagaactcagagcggcgcagggcgggggtagtgaccccgccagcgcctaaccaccaactgcctgcaaaggaggcaatcaatggctacccataagcctatcaatattctggaggcgttcgcagcagcgccgccaccgctggactacgttttgcccaacatggtggccggtacggtcggggcgctggtgtcgcccggtggtgccggtaaatccatgctggccctgcaactggccgcacagattgcaggcgggccggatctgctggaggtgggcgaactgcccaccggcccggtgatctacctgcccgccgaagacccgcccaccgccattcatcaccgcctgcacgcccttggggcgcacctcagcgccgaggaacggcaagccgtggctgacggcctgctgatccagccgctgatcggcagcctgcccaacatcatggccccggagtggttcgacggcctcaagcgcgccgccgagggccgccgcctgatggtgctggacacgctgcgccggttccacatcgaggaagaaaacgccagcggccccatggcccaggtcatcggtcgcatggaggccatcgccgccgataccgggtgctctatcgtgttcctgcaccatgccagcaagggcgcggccatgatgggcgcaggcgaccagcagcaggccagccggggcagctcggtactggtcgataacatccgctggcagtcctacctgtcgagcatgaccagcgccgaggccgaggaatggggtgtggacgacgaccagcgccggttcttcgtccgcttcggtgtgagcaaggccaactatggcgcaccgttcgctgatcggtggttcaggcggcatgacggcggggtgctcaagcccgccgtgctggagaggcagcgcaagagcaagggggtgccccgtggtgaagcctaagaacaagcacagcctcagccacgtccggcacgacccggcgcactgtctggcccccggcctgttccgtgccctcaagcggggcgagcgcaagcgcagcaagctggacgtgacgtatgactacggcgacggcaagcggatcgagttcagcggcccggagccgctgggcgctgatgatctgcgcatcctgcaagggctggtggccatggctgggcctaatggcctagtgcttggcccggaacccaagaccgaaggcggacggcagctccggctgttcctggaacccaagtgggaggccgtcaccgctgaatgccatgtggtcaaaggtagctatcgggcgctggcaaaggaaatcggggcagaggtcgatagtggtggggcgctcaagcacatacaggactgcatcgagcgcctttggaaggtatccatcatcgcccagaatggccgcaagcggcaggggtttcggctgctgtcggagtacgccagcgacgaggcggacgggcgcctgtacgtggccctgaaccccttgatcgcgcaggccgtcatgggtggcggccagcatgtgcgcatcagcatggacgaggtgcgggcgctggacagcgaaaccgcccgcctgctgcaccagcggctgtgtggctggatcgaccccggcaaaaccggcaaggcttccatagataccttgtgcggctatgtctggccgtcagaggccagtggttcgaccatgcgcaagcgccgcaagcgggtgcgcgaggcgttgccggagctggtcgcgctgggctggacggtaaccgagttcgcggcgggcaagtacgacatcacccggcccaaggcggcaggctga

SEQ ID NO: 21 - DNA, 17479 bp, synthetic construct
  source 1..17479: mol_type = other DNA
ccccccccactctattgtaaacaagacatttttatcttttatattcaatggcttattttcctgctaattggtaataccatgaaaaataccatgctcagaaaaggcttaacaatattttgaaaaattgcctactgagcgctgccgcacagctccataggccgctttcctggctttgcttccagatgtatgctcttctgctcccgaacgccagcaagacgtagcccagcgcgtcggccagcttgcaattcgcgctaacttacattaattgcgttgcgctcactgcccgctttccagtcgggaaacctgtcgtgccagctgcattaatgaatcggccaacgcgcggggagaggcggtttgcgtattgggcgccagggtggtttttcttttcaccagtgagacgggcaacagctgattgcccttcaccgcctggccctgagagagttgcagcaagcggtccacaaggctctcaagggcatcggtcgcacgcttgtgttgacagctagctcagtcctaggtataatactagtcacgtgaactgccgagtaggtagctgataactttaaagaagcaaaagccaaatacggtgtaatgtgaactgccgagtaggtagctgataactcgagagatccggctgctaacaaacccgcttaaggaagatggccaacttatttacataaggctgctgccaccgctgagcaataactagcataaccccttggggcctctaaacgggtcttgaggggttttttggtttaaacccatctaattgggaattccccctgcctcgcgcgtttcggtgatgacggtgaaaacctctgacacagcgatcgcttaattaattatgacaacttgacggctacatcattcactttttcttcacaaccggcacggaactcgctcgggctggccccggtgcattttttaaatacccgcgagaaatagagttgatcgtcaaaaccaacattgcgaccgacggtggcgataggcatccgggtggtgctcaaaagcagcttcgcctggctgatacgttggtcctcgcgccagcttaagacgctaatccctaactgctggcggaaaagatgtgacagacgcgacggcgacaagcaaacatgctgtgcgacgctggcgatatcaaaattgctgtctgccaggtgatcgctgatgtactgacaagcctcgcgtacccgattatccatcggtggatggagcgactcgttaatcgcttccatgcgccgcagtaacaattgctcaagcagatttatcgccagcagctccgaatagcgcccttccccttgcccggcgttaatgatttgcccaaacaggtcgctgaaatgcggctggtgcgcttcatccgggcgaaagaaccccgtattggcaaatattgacggccagttaagccattcatgccagtaggcgcgcggacgaaagtaaacccactggtgataccattcgcgagcctccggatgacgaccgtagtgatgaatctctcctggcgggaacagcaaaatatcacccggtcggcaaacaaattctcgtccctgatttttcaccaccccctgaccgcgaatggtgagattgagaatataacctttcattcccagcggtcggtcgataaaaaaatcgagataaccgttggcctcaatcggcgttaaacccgccaccagatgggcattaaacgagtatcccggcagcaggggatcattttgcgcttcagccatacttttcatactcccgccattcagagaagaaaccaattgtccatattgcatcagacattgccgtcactgcgtcttttactggctcttctcgctaaccaaaccggtaaccccgcttattaaaagcattctgtaacaaagcgggaccaaagccatgacaaaaacgcgtaacaaaagtgtctataatcacggcagaaaagtccacattgattatttgcacggcgtcacactttgctatgccatagcatttttatccataagattagcggatcctacctgacgctttttatcgcaactctctactgtttctccatacccgggatccgaattcgagcgaaggagatatacatatgtttttgcaaagacctaaaccttacagcgatgaaagtttagaaagtttctttatccgagtggctaacaaaaatggctacggtgatgtccatcgcttcctagaagccactaaacgattccttcaagacattgaccataatggctatcaaacctttccgactgatataactcggataaacccatactcagctaaaaacagttccagcgcacgaactgcgtcattcctgaaacttgcacaattgacatttaatgaaccgccagagctacttgggttggcaattaacagaacaaacatgaaatactcgccgtcaactagcgcggttgttagaggtgcagaagtctttcctcgcagtttactacggacgcactccatcccctgctgtcctttgtgtctgcgagaaaatggctacgcctcctacctttggcactttcaggggtacgaatactgccacagccataacgtacctttaattaccacttgtagctgtggtaaggagtttgactaccgagtatctgggttaaagggcatttgctgcaaatgcaaggagcctatcaccttaaccagcagggagaacggtcatgaggcagcgtgtactgtttcaaactggcttgctggccatgaatctaaacctctgccaaatcttcctaaaagctaccgatggggtttagttcattggtggatgggtattaaagatagcgagttcgatcacttttcgttcgttcaatttttctcaaactggccaaggtcattccactcgataatcgaagatgaagtagagttcaaccttgagcatgctgttgtcagcacgtctgaattacgactaaaagatcttcttggtcgattgtttttcggttcaattcggttacctgagcggaatcttcaacacaatatcatccttggtgagcttctctgctatttagaaaatcgtttatggcaagacaagggattaatcgccaacctcaaaatgaacgcgttagaggcgactgtaatgttaaattgtagcctcgatcagattgcatcaatggttgaacaacgcatcttgaagccaaatcgaaaaagcaagcccaacagccctcttgatgttaccgattatctatttcatttcggcgatattttctgtctttggttagctgagttccaaagcgatgagtttaaccgttcgttttatgtgtcgaggtggtaaatgcaaactctgaaagaactaatcgcatccaatcctgacgacttaacaactgaacttaagagagcatttcgtccactcacaccgcatattgcaattgatggtaatgaacttgacgcactgacgatattagtcaatttaaccgataagactgatgatcagaaagacctgctcgatcgagccaaatgcaagcaaaaacttcgagatgaaaaatggtgggctagctgcataaattgcgttaattacagacaaagccataacccaaaattcccggatatacgttctgaaggcgtgattcgaacccaagccctgggtgaattaccgagtttcctactctcgtcctcaaaaatcccaccataccattggtcatatagccatgattcaaaatacgtcaacaaaagcgcattcctcaccaatgagttttgttgggatggtgagatctcatgtttgggtgagcttcttaaagatgcagatcacccactttggaatactttgaaaaagttaggttgttctcaaaaaacttgcaaagcaatggcaaaacaactagctgatattactctcacgactatcaatgtcacactcgcaccaaattacctgactcaaatatctctccccgatagtgatacatcctacatttcactctctcctgttgcatcgctatcgatgcaaagccactttcatcagaggctccaagatgaaaatcggcatagcgcgataacgcggtttagccgaactaccaacatgggggtcactgcgatgacatgtggcggcgcatttagaatgttaaagtctggcgctaagttttccagcccccctcatcaccgattaaacagtaaacgaagttggttgacgtcagagcatgttcagtcattaaaacagtaccagcgcctcaacaaaagcctcatacctgaaaactctcggattgcactccgtagaaaatacaaaatcgagcttcaaaatatggtcagatcttggtttgcaatgcaagaccatacccttgattcgaacatacttatccaacatttgaatcatgacctatcttacttaggagccacaaaacgttttgcatacgatccagcgatgaccaagctctttactgagcttttgaaacgagagttatcaaattcaatcaataatggtgagcaacacactaatggatcgtttttagtcctaccgaatatcagggtttgtggcgcaacagctttaagctccccggtaacggtggggattccatcacttacagctttctttggcttcgttcacgcatttgaacggaatataaatcgcaccacctcatcgtttcgtgttgaatcctttgcgatatgcgtccatcaactacatgtcgagaagcgaggtttgacagcagagtttgtggaaaaaggcgacgggactatatccgctcccgcgacccgggatgactggcagtgtgatgtcgtatttagccttattttgaacaccaactttgctcaacatattgaccaagatacgttagttacatcactaccaaagcgattggctcggggttcagcaaaaattgcgattgatgactttaaacatatcaactcattctcgacattagaaacagcgatcgaatctctgccaatagaagctggtaggtggttatcactttacgcacagtcaaacaataatctaagtgatctattagcagccatgacagaggaccatcagctcatggcaagctgcgtcggttaccacttgttagaagagcccaaagataaaccaaactccctcagaggttacaaacacgctatcgccgagtgcatcattggactcattaactcaatcacctttagctcagagactgatcccaacacaatcttttggtcgctaaagaactatcaaaactacctagtggtacagccaaggagtatcaacgatgaaactaccgacaaatctagcctatgagcgctctatcgacccatcagatgtctgtttttttgtcgtctggcccgatgatagaaaaacacctttaacctacaattctcgtactctgctcgggcaaatggaagcggcatcattagcctatgatgtctcaggtcaaccaataaaaagtgccaccgctgaggcgttagctcaagggaaccctcatcaagttgatttctgccacgttccatacggtgcgagtcatattgaatgcagtttctccgtctcgttttcttctgaactacgtcaaccatataagtgtaactcaagcaaagttaaacaaacgctagtgcaattagtcgagctctacgaaacgaaaatcggctggactgagctagcaacccgatatttgatgaacatttgcaacggtaaatggctgtggaaaaatacccgtaaagcctattgctggaacattgtacttacaccttggccttggaacggggaaaaggttggatttgaagatattcgtactaactacacctcacggcaagactttaaaaataataaaaattggtctgctatagttgaaatgatcaaaaccgcattttctagtactgatgggctggcgatatttgaagtcagggccaccttgcacttgccaacgaatgctatggtgcggccaagccaagttttcacagaaaaagaaagtggcagtaaaagtaaatctaaaactcaaaacagtcgagtttttcagagtacaactattgatggtgaacgatcgccaatactaggggcctttaaaacgggagcagctattgcaaccattgacgactggtatcctgaagccactgagccactaagggtcggacggtttggggttcatcgcgaagatgtcacttgctaccgtcatccgtctaccggaaaagattttttctcgatattacaacaagcagagcactatattgaagtgttgagcgccaacaaaactcccgctcaagaaactatcaacgacatgcactttttaatggctaacctgattaagggtgggatgttccagcataaaggagactgactgtgaaatggtattataagacaatcacctttctgccagagttgtgcaacaacgagtcactggctgcaaagtgtctccgcgttctgcatggatttaactatcagtatgagacacgaaatatcggcgtttcatttccgctttggtgtgatgcaacggttggaaaaaagatttcatttgtcagcaagaacaagatagaactcgacttactacttaaacaacactatttcgtccaaatggaacaacttcaatactttcatatatccaacactgttctcgtcccagaagattgtacatacgtttcctttagacgctgtcaatctatagataagctcacagcagcagggctggcaaggaaaatcagacgcctggagaaacgtgctctatctagaggcgagcaatttgacccatcatcttttgctcaaaaagagcatactgcaatagcgcactaccactcacttggggagtccagcaaacagacgaaccgcaactttcgactcaatatcaggatgctctcggagcaaccccgtgaggggaactcgatttttagtagctatggcttatcaaattcagaaaactcgtttcagcctgtacccttaatctgacctttaataaggagatataccatggcgacaagtttacctacgccctcagcaattacgacttcggcgttagagtatgcattccatactcccgctcgcaatctaacgaaatctcgcggaaaaaacattcatcgttatgtcagtgtaaagatgagtaagaggattacggtagaatctactctagagtgtgatgcctgctatcactttgattttgagccaagtattgttcgcttttgcgctcaaccgattcgatttttatattatctcaatggtcagtctcactcctatgttcctgactttctagttcaatttgataccaacgagtttgttctatatgaagtaaagtcagcttatgctaagaacaaacctgattttgatgttgaatgggaggcgaaagtaaaagcagcaactgaactagggctagaattggagcttgttgaagagagtgatattagggatacggttgtattaaataatcttaagcgcatgcatcgttatgcttcgaaagatgagctgaataacgtacataactctctcttaaaaataataaagtacaatggcgcccaatctgcaagatgcttgggagaacagttgggtttaaaaggccgaactgttttaccaattttgtgcgatttgctgtcaaggtgtttactcgatacacgtttggataagcctctatctcttgaatctcgatttgagttggccagttatggctaagaaagggttctcaagtttccatagaaaagcagtctcttcccaagatacgcttgaatcgatagagcttgtctctagcgctaattgtctagaaagtgttacgtatcaagatatatcagcatttcccgaaacaattgcggtagagattaatttccgattaagcattcttcgctttttagcgcgaaagtgcgaaaccattgtggccaaatcaattgaaccacatcgtgtagagctacagcaaaactatagtagaaaaatacccagtgcaataacgatatatcgatggtggcttgcttttcgaaaatcagactacaaccccattagcttagcacctaatatcaaggatagaggtaatagagagacaaaagtgtcaacagttgttgattctattatggaacaggcagttgaaagagttatatctggacgaaaagtcaatgttagctctgcatataaacgtgttcgacgaaaagttcgtcaatacaatctaactcatggaacgaaatacacgtatcctaagtacgaatctgtaagaaagcgagtaaaaaagaaaaccccatttgagttattagccgcagggaaaggggagagagtagctaagagagagtttcgccgaatgggaaaaaagatcctcacgtctagcgtgctagagagggttgaaatagatcacactgtcgttgacctttttgcagtacacgaagagtatcgaatcccattgggccgaccttggcttactcaattggttgattgttacagtaaagctgtaatcggtttttatttaggtttcgagcctcctagctatgtgtcggtttcccttgcacttaagaatgcaatacaacgcaaagatgacttaatctcctcgtatgaatcgatcgagaatgaatggctatgttatggcatcccagacctactcgtaactgataatggtaaagagtttttgtcgaaagcatttgatcaagcatgtgaatcactattgatcaatgtgcatcaaaataaagttgagacgcccgacaacaaacctcatgttgaacgtaactacgggactattaatacttctctgttagacgatttacctgggaaatccttcagccagtaccttcaaagagaagggtacgactctgtgggagaagctacccttacactcaatgagattagagaaatttacttaatttggttggtggatatttatcataaaaaacccaatcagagaggcactaattgtcctaatgttgcgtggaaaaagggttgtcaagaatgggaaccagaggagttctctggttctaaagacgaattagactttaaatttgctattgttgattacaaacaacttactaaagtagggataactgtctacaaagaactgagttatagcaatgaccgtttagctgaatatagagggaagaaaggaaaccataaagttcagttcaagtataaccctgagtgtatggcagttatttgggtgttggatgaggatatgaatgagtactttacagttaatgcgattgactacgaatatgcaagtagagtatcactttggcaacataaatataacatgaaatatcaagcagaactaaattcagcagaatatgatgaggacaaggaaattgatgcagaaataaaaattgaagaaatcgcagatcgttcaattgttaagactaacaaaatcagagctcggaggcgtggcgctaggcatcaagagaatagcgcaagggctaagtcaatcagtaatgcgaacccggcctcgatacaaaaacatgaagatgaaatcgttagtgcagataatgacgattgggatattgattatgtctgagaaatcgtcaaatgagtgaaacgcgtgaggctcgtatatcaagagctaaaagggcatttgtatccacaccgagcgttaggaaaatcttgagttacatggatagatgtagagatctatcagacctagagtctgagcctacatgcatgatggtctatggtgcttcgggtgtaggtaaaacgaccgtcatcaagaaatacttaaatcaaaacagaagagagtccgaagccgggggcgatataataccggttttgcatattgagttgccagacaatgcgaagccagtagatgcagcaagggaattgctggttgaaatgggtgacccgctagcactttatgaaactgacttagctagattgacgaaaagactgactgaattaatccctgcggtcggcgtgaagctgattattatcgatgagttccaacatttggtggaagaaaggtcaaatcgggttcttacccaagtaggtaattggctaaaaatgatacttaacaaaacgaaatgtccaattgttatatttggtatgccatactcaaaagttgtactgcaagcaaactcgcaacttcacgggcgattttccattcaggttgaactgcgcccctttagctaccagggaggtagaggtgtatttaaaacttttttggaataccttgataaagccctaccttttgaaaaacaggctggcttagccaacgaaagtttgcagaaaaaattgtatgcattctctcagggaaacatgcgttcgttgagaaaccttatttatcaagcatctatcgaagcaattgataatcagcatgagacgataaccgaagaagatttcgtttttgcatcgaagttgacatcgggcgataaacccaactcatggaaaaatccttttgaggagggtgttgaggtaacagaagatatgttacgaccgccaccaaaagatattggttgggaggactatttgagacattcaaccccgagagtgagtaaaccaggtagaaataaaaactttttcgaataacctaggctgctgcgctgctgccaccgctgagcaataactagcataaccccttggggcctctaaacgggtcttgaggggttttttgtctagagtcgacctgcaggcatgcaagcttggctgttttggcggatgagagaagattttcagcctgatacagattaaatcagaacgcagaagcggtctgataaaacagaatttgcctggcggcagtagcgcggtggtcccacctgaccccatgccgaactcagaagtgaaacgccgtagcgccgatggtagtgtggggtctccccatgcgagagtagggaactgccaggcatcaaataaaacgaaaggctcagtcgaaagactgggcctttcgttttatctgttgtttgtcggtgaacgctctcctgagtaggacaaatccgccgggagcggatttgaacgttgcgaagcaacggcccggagggtggcgggcaggacgcccgccataaactgccaggcatcaaattaagcagaaggccatcctgacggatggcctttttgcgtttctacaaactcttttgtttatttttctaaatacattcaaatatgtatccgctcatgagacaataaccctgataaatgcttcaataatattgaaaaaggaagagtatgagtattcaacatttccgtgtcgcccttattcccttttttgcggcattttgccttcctgtttttgctcacccagaaacgctggtgaaagtaaaagatgctgaagatcagttgggtgcacgagtgggttacatcgaactggatctcaacagcggtaagatccttgagagttttcgccccgaagaacgttttccaatgatgagcacttttaaagttctgctatgtggcgcggtattatcccgtgttgacgccgggcaagagcaactcggtcgccgcatacactattctcagaatgacttggttgagtactcaccagtcacagaaaagcatcttacggatggcatgacagtaagagaattatgcagtgctgccataaccatgagtgataacactgcggccaacttacttctgacaacgatcggaggaccgaaggagctaaccgcttttttgcacaacatgggggatcatgtaactcgccttgatcgttgggaaccggagctgaatgaagccataccaaacgacgagcgtgacaccacgatgcctgtagcaatggcaacaacgttgcgcaaactattaactggcgaactacttactctagcttcccggcaacaattaatagactggatggaggcggataaagttgcaggaccacttctgcgctcggcccttccggctggctggtttattgctgataaatctggagccggtgagcgtgggtctcgcggtatcattgcagcactggggccagatggtaagccctcccgtatcgtagttatctacacgacggggagtcaggcaactatggatgaacgaaatagacagatcgctgagataggtgcctcactgattaagcattggtaactgtcagaccaagtttactcatatatactttagattgatttctgaaagcgaccaggtgctcggcgtggcaagactcgcagcgaacccgtagaaagccatgctccagccgcccgcattggagaaattcttcaaattcccgttgcacatagcccggcaattcctttccctgctctgccataagcgcagcgaatgccgggtaatactcgtcaacgatctgatagagaagggtttgctcgggtcggtggctctggtaacgaccagtatcccgatcccggctggccgtcctggccgccacatgaggcatgttccgcgtccttgcaatactgtgtttacatacagtctatcgcttagcggaaagttcttttaccctcagccgaaatgcctgccgttgctagacattgccagccagtgcccgtcactcccgtactaactgtcacgaacccctgcaataactgtcacgcccccctgcaataactgtcacgaacccctgcaataactgtcacgcccccaaacctgcaaacccagcaggggcgggggctggcggggtgttggaaaaatccatccatgattatctaagaataatccactaggcgcggttatcagcgcccttgtggggcgctgctgcccttgcccaatatgcccggccagaggccggatagctggtctattcgctgcgctaggctacacaccgccccaccgctgcgcggcagggggaaaggcgggcaaagcccgctaaaccccacaccaaaccccgcagaaatacgctggagcgcttttagccgctttagcggcctttccccctacccgaagggtgggggcgcgtgtgcagccccgcagggcctgtctcggtcgatcattcagcccggctcatccttctggcgtggcggcagaccgaacaaggcgcggtcgtggtcgcgttcaaggtacgcatccattgccgccatgagccgatcctccggccactcgctgctgttcaccttggccaaaatcatggcccccaccagcaccttgcgccttgtttcgttcttgcgctcttgctgctgttcccttgcccgctcccgctgaatttcggcattgattcgcgctcgttgttcttcgagcttggccagccgatccgccgccttgttgctccccttaaccatcttgacaccccattgttaatgtgctgtctcgtaggctatcatggaggcacagcggcggcaatcccgaccctactttgtaggggagggcgcacttaccggtttctcttcgagaaactggcctaacggccacccttcgggcggtgcgctctccgagggccattgcatggagccgaaaagcaaaagcaacagcgaggcagcatggcgatttatcaccttacggcgaaaaccggcagcaggtcgggcggccaatcggccagggccaaggccgactacatccagcgcgaaggcaagtatgcccgcgacatggatgaagtcttgcacgccgaatccgggcacatgccggagttcgtcgagcggcccgccgactactgggatgctgccgacctgtatgaacgcgccaatgggcggctgttcaaggaggtcgaatttgccctgccggtcgagctgaccctcgaccagcagaaggcgctggcgtccgagttcgcccagcacctgaccggtgccgagcgcctgccgtatacgctggccatccatgccggtggcggcgagaacccgcactgccacctgatgatctccgagcggatcaatgacggcatcgagcggcccgccgctcagtggttcaagcggtacaacggcaagaccccggagaagggcggggcacagaagaccgaagcgctcaagcccaaggcatggcttgagcagacccgcgaggcatgggccgaccatgccaaccgggcattagagcgggctggccacgacgcccgcattgaccacagaacacttgaggcgcagggcatcgagcgcctgcccggtgttcacctggggccgaacgtggtggagatggaaggccggggcatccgcaccgaccgggcagacgtggccctgaacatcgacaccgccaacgcccagatcatcgacttacaggaataccgggaggcaatagaccatgaacgcaatcgacagagtgaagaaatccagaggcatcaacgagttagcggagcagatcgaaccgctggcccagagcatggcgacactggccgacgaagcccggcaggtcatgagccagaccaagcaggccagcgaggcgcaggcggcggagtggctgaaagcccagcgccagacaggggcggcatgggtggagctggccaaagagttgcgggaggtagccgccgaggtgagcagcgccgcgcagagcgcccggagcgcgtcgcgggggtggcactggaagctatggctaaccgtgatgctggcttccatgatgcctacggtggtgctgctgatcgcatcgttgctcttgctcgacctgacgccactgacaaccgaggacggctcgatctggctgcgcttggtggcccgatgaagaacgacaggactttgcaggccataggccgacagctcaaggccatgggctgtgagcgcttcgatatcggcgtcagggacgcacccaccggccagatgatgaaccgggaatggtcagccgccgaagtgctccagaacacgccatggctcaagcggatgaatgcccagggcaatgacgtgtatatcaggcccgccgagcaggagcggcatggtctggtgctggtggacgacctcagcgagtttgacctggatgacatgaaagccgagggccgggagcctgccctggtagtggaaaccagcccgaagaactatcaggcatgggtcaaggtggccgacgccgcaggcggtgaacttcgggggcagattgcccggacgctggccagcgagtacgacgccgacccggccagcgccgacagccgccactatggccgcttggcgggcttcaccaaccgcaaggacaagcacaccacccgcgccggttatcagccgtgggtgctgctgcgtgaatccaagggcaagaccgccaccgctggcccggcgctggtgcagcaggctggccagcagatcgagcaggcccagcggcagcaggagaaggcccgcaggctggccagcctcgaactgcccgagcggcagcttagccgccaccggcgcacggcgctggacgagtaccgcagcgagatggccgggctggtcaagcgcttcggtcatgacctcagcaagtgcgactttatcgccgcgcagaagctggccagccggggccgcagtgccgaggaaatcggcaaggccatggccgaggccagcccagcgctggcagagcgcaagcccggccacgaagcggattacatcgagcgcaccgtcagcaaggtcatgggtctgcccagcgtccagcttgcgcgggccgagctggcacgggcaccggcaccccgccagcgaggcatggacaggggcgggccagatttcagcatgtagtgcttgcgttggtactcacgcctgttatactatgagtactcacgcacagaagggggttttatggaatacgaaaaaagcgcttcagggtcggtctacctgatcaaaagtgacaagggctattggttgcccggtggctttggttatacgtcaaacaaggccgaggctggccgcttttcagtcgctgatatggccagccttaaccttgacggctgcaccttgtccttgttccgcgaagacaagcctttcggccccggcaagtttctcggtgactgatatgaaagaccaaaaggacaagcagaccggcgacctgctggccagccctgacgctgtacgccaagcgcgatatgccgagcgcatgaaggccaaagggatgcgtcagcgcaagttctggctgaccgacgacgaatacgaggcgctgcgcgagtgcctggaagaactcagagcggcgcagggcgggggtagtgaccccgccagcgcctaaccaccaactgcctgcaaaggaggcaatcaatggctacccataagcctatcaatattctggaggcgttcgcagcagcgccgccaccgctggactacgttttgcccaacatggtggccggtacggtcggggcgctggtgtcgcccggtggtgccggtaaatccatgctggccctgcaactggccgcacagattgcaggcgggccggatctgctggaggtgggcgaactgcccaccggcccggtgatctacctgcccgccgaagacccgcccaccgccattcatcaccgcctgcacgcccttggggcgcacctcagcgccgaggaacggcaagccgtggctgacggcctgctgatccagccgctgatcggcagcctgcccaacatcatggccccggagtggttcgacggcctcaagcgcgccgccgagggccgccgcctgatggtgctggacacgctgcgccggttccacatcgaggaagaaaacgccagcggccccatggcccaggtcatcggtcgcatggaggccatcgccgccgataccgggtgctctatcgtgttcctgcaccatgccagcaagggcgcggccatgatgggcgcaggcgaccagcagcaggccagccggggcagctcggtactggtcgataacatccgctggcagtcctacctgtcgagcatgaccagcgccgaggccgaggaatggggtgtggacgacgaccagcgccggttcttcgtccgcttcggtgtgagcaaggccaactatggcgcaccgttcgctgatcggtggttcaggcggcatgacggcggggtgctcaagcccgccgtgctggagaggcagcgcaagagcaagggggtgccccgtggtgaagcctaagaacaagcacagcctcagccacgtccggcacgacccggcgcactgtctggcccccggcctgttccgtgccctcaagcggggcgagcgcaagcgcagcaagctggacgtgacgtatgactacggcgacggcaagcggatcgagttcagcggcccggagccgctgggcgctgatgatctgcgcatcctgcaagggctggtggccatggctgggcctaatggcctagtgcttggcccggaacccaagaccgaaggcggacggcagctccggctgttcctggaacccaagtgggaggccgtcaccgctgaatgccatgtggtcaaaggtagctatcgggcgctggcaaaggaaatcggggcagaggtcgatagtggtggggcgctcaagcacatacaggactgcatcgagcgcctttggaaggtatccatcatcgcccagaatggccgcaagcggcaggggtttcggctgctgtcggagtacgccagcgacgaggcggacgggcgcctgtacgtggccctgaaccccttgatcgcgcaggccgtcatgggtggcggccagcatgtgcgcatcagcatggacgaggtgcgggcgctggacagcgaaaccgcccgcctgctgcaccagcggctgtgtggctggatcgaccccggcaaaaccggcaaggcttccatagataccttgtgcggctatgtctggccgtcagaggccagtggttcgaccatgcgcaagcgccgcaagcgggtgcgcgaggcgttgccggagctggtcgcgctgggctggacggtaaccgagttcgcggcgggcaagtacgacatcacccggcccaaggcggcaggctga

SEQ ID NO: 22 - DNA, 16860 bp, synthetic construct
  source 1..16860: mol_type = other DNA
ccccccccactctattgtaaacaagacatttttatcttttatattcaatggcttattttcctgctaattggtaataccatgaaaaataccatgctcagaaaaggcttaacaatattttgaaaaattgcctactgagcgctgccgcacagctccataggccgctttcctggctttgcttccagatgtatgctcttctgctcccgaacgaaggctctcaagggcatcggtcgcacgcttgtgttgacagctagctcagtcctaggtataatactagtcacgtgaactgccgagtaggtagctgataacacaaatttaaaatctgagagggataggagactgtgaactgccgagtaggtagctgataactcgagagatccggctgctaacaaacccgcttaaggaagatggccaacttatttacataaggctgctgccaccgctgagcaataactagcataaccccttggggcctctaaacgggtcttgaggggttttttggtttaaacccatctaattgggaattccccctgcctcgcgcgtttcggtgatgacggtgaaaacctctgacacagcgatcgcttatgacaacttgacggctacatcattcactttttcttcacaaccggcacggaactcgctcgggctggccccggtgcattttttaaatacccgcgagaaatagagttgatcgtcaaaaccaacattgcgaccgacggtggcgataggcatccgggtggtgctcaaaagcagcttcgcctggctgatacgttggtcctcgcgccagcttaagacgctaatccctaactgctggcggaaaagatgtgacagacgcgacggcgacaagcaaacatgctgtgcgacgctggcgatatcaaaattgctgtctgccaggtgatcgctgatgtactgacaagcctcgcgtacccgattatccatcggtggatggagcgactcgttaatcgcttccatgcgccgcagtaacaattgctcaagcagatttatcgccagcagctccgaatagcgcccttccccttgcccggcgttaatgatttgcccaaacaggtcgctgaaatgcggctggtgcgcttcatccgggcgaaagaaccccgtattggcaaatattgacggccagttaagccattcatgccagtaggcgcgcggacgaaagtaaacccactggtgataccattcgcgagcctccggatgacgaccgtagtgatgaatctctcctggcgggaacagcaaaatatcacccggtcggcaaacaaattctcgtccctgatttttcaccaccccctgaccgcgaatggtgagattgagaatataacctttcattcccagcggtcggtcgataaaaaaatcgagataaccgttggcctcaatcggcgttaaacccgccaccagatgggcattaaacgagtatcccggcagcaggggatcattttgcgcttcagccatacttttcatactcccgccattcagagaagaaaccaattgtccatattgcatcagacattgccgtcactgcgtcttttactggctcttctcgctaaccaaaccggtaaccccgcttattaaaagcattctgtaacaaagcgggaccaaagccatgacaaaaacgcgtaacaaaagtgtctataatcacggcagaaaagtccacattgattatttgcacggcgtcacactttgctatgccatagcatttttatccataagattagcggatcctacctgacgctttttatcgcaactctctactgtttctccatacccgggatccgaattcgagcgaaggagatatacatatgtttttgcaaagacctaaaccttacagcgatgaaagtttagaaagtttctttatccgagtggctaacaaaaatggctacggtgatgtccatcgcttcctagaagccactaaacgattccttcaagacattgaccataatggctatcaaacctttccgactgatataactcggataaacccatactcagctaaaaacagttccagcgcacgaactgcgtcattcctgaaacttgcacaattgacatttaatgaaccgccagagctacttgggttggcaattaacagaacaaacatgaaatactcgccgtcaactagcgcggttgttagaggtgcagaagtctttcctcgcagtttactacggacgcactccatcccctgctgtcctttgtgtctgcgagaaaatggctacgcctcctacctttggcactttcaggggtacgaatactgccacagccataacgtacctttaattaccacttgtagctgtggtaaggagtttgactaccgagtatctgggttaaagggcatttgctgcaaatgcaaggagcctatcaccttaaccagcagggagaacggtcatgaggcagcgtgtactgtttcaaactggcttgctggccatgaatctaaacctctgccaaatcttcctaaaagctaccgatggggtttagttcattggtggatgggtattaaagatagcgagttcgatcacttttcgttcgttcaatttttctcaaactggccaaggtcattccactcgataatcgaagatgaagtagagttcaaccttgagcatgctgttgtcagcacgtctgaattacgactaaaagatcttcttggtcgattgtttttcggttcaattcggttacctgagcggaatcttcaacacaatatcatccttggtgagcttctctgctatttagaaaatcgtttatggcaagacaagggattaatcgccaacctcaaaatgaacgcgttagaggcgactgtaatgttaaattgtagcctcgatcagattgcatcaatggttgaacaacgcatcttgaagccaaatcgaaaaagcaagcccaacagccctcttgatgttaccgattatctatttcatttcggcgatattttctgtctttggttagctgagttccaaagcgatgagtttaaccgttcgttttatgtgtcgaggtggtaaatgcaaactctgaaagaactaatcgcatccaatcctgacgacttaacaactgaacttaagagagcatttcgtccactcacaccgcatattgcaattgatggtaatgaacttgacgcactgacgatattagtcaatttaaccgataagactgatgatcagaaagacctgctcgatcgagccaaatgcaagcaaaaacttcgagatgaaaaatggtgggctagctgcataaattgcgttaattacagacaaagccataacccaaaattcccggatatacgttctgaaggcgtgattcgaacccaagccctgggtgaattaccgagtttcctactctcgtcctcaaaaatcccaccataccattggtcatatagccatgattcaaaatacgtcaacaaaagcgcattcctcaccaatgagttttgttgggatggtgagatctcatgtttgggtgagcttcttaaagatgcagatcacccactttggaatactttgaaaaagttaggttgttctcaaaaaacttgcaaagcaatggcaaaacaactagctgatattactctcacgactatcaatgtcacactcgcaccaaattacctgactcaaatatctctccccgatagtgatacatcctacatttcactctctcctgttgcatcgctatcgatgcaaagccactttcatcagaggctccaagatgaaaatcggcatagcgcgataacgcggtttagccgaactaccaacatgggggtcactgcgatgacatgtggcggcgcatttagaatgttaaagtctggcgctaagttttccagcccccctcatcaccgattaaacagtaaacgaagttggttgacgtcagagcatgttcagtcattaaaacagtaccagcgcctcaacaaaagcctcatacctgaaaactctcggattgcactccgtagaaaatacaaaatcgagcttcaaaatatggtcagatcttggtttgcaatgcaagaccatacccttgattcgaacatacttatccaacatttgaatcatgacctatcttacttaggagccacaaaacgttttgcatacgatccagcgatgaccaagctctttactgagcttttgaaacgagagttatcaaattcaatcaataatggtgagcaacacactaatggatcgtttttagtcctaccgaatatcagggtttgtggcgcaacagctttaagctccccggtaacggtggggattccatcacttacagctttctttggcttcgttcacgcatttgaacggaatataaatcgcaccacctcatcgtttcgtgttgaatcctttgcgatatgcgtccatcaactacatgtcgagaagcgaggtttgacagcagagtttgtggaaaaaggcgacgggactatatccgctcccgcgacccgggatgactggcagtgtgatgtcgtatttagccttattttgaacaccaactttgctcaacatattgaccaagatacgttagttacatcactaccaaagcgattggctcggggttcagcaaaaattgcgattgatgactttaaacatatcaactcattctcgacattagaaacagcgatcgaatctctgccaatagaagctggtaggtggttatcactttacgcacagtcaaacaataatctaagtgatctattagcagccatgacagaggaccatcagctcatggcaagctgcgtcggttaccacttgttagaagagcccaaagataaaccaaactccctcagaggttacaaacacgctatcgccgagtgcatcattggactcattaactcaatcacctttagctcagagactgatcccaacacaatcttttggtcgctaaagaactatcaaaactacctagtggtacagccaaggagtatcaacgatgaaactaccgacaaatctagcctatgagcgctctatcgacccatcagatgtctgtttttttgtcgtctggcccgatgatagaaaaacacctttaacctacaattctcgtactctgctcgggcaaatggaagcggcatcattagcctatgatgtctcaggtcaaccaataaaaagtgccaccgctgaggcgttagctcaagggaaccctcatcaagttgatttctgccacgttccatacggtgcgagtcatattgaatgcagtttctccgtctcgttttcttctgaactacgtcaaccatataagtgtaactcaagcaaagttaaacaaacgctagtgcaattagtcgagctctacgaaacgaaaatcggctggactgagctagcaacccgatatttgatgaacatttgcaacggtaaatggctgtggaaaaatacccgtaaagcctattgctggaacattgtacttacaccttggccttggaacggggaaaaggttggatttgaagatattcgtactaactacacctcacggcaagactttaaaaataataaaaattggtctgctatagttgaaatgatcaaaaccgcattttctagtactgatgggctggcgatatttgaagtcagggccaccttgcacttgccaacgaatgctatggtgcggccaagccaagttttcacagaaaaagaaagtggcagtaaaagtaaatctaaaactcaaaacagtcgagtttttcagagtacaactattgatggtgaacgatcgccaatactaggggcctttaaaacgggagcagctattgcaaccattgacgactggtatcctgaagccactgagccactaagggtcggacggtttggggttcatcgcgaagatgtcacttgctaccgtcatccgtctaccggaaaagattttttctcgatattacaacaagcagagcactatattgaagtgttgagcgccaacaaaactcccgctcaagaaactatcaacgacatgcactttttaatggctaacctgattaagggtgggatgttccagcataaaggagactgactgtgaaatggtattataagacaatcacctttctgccagagttgtgcaacaacgagtcactggctgcaaagtgtctccgcgttctgcatggatttaactatcagtatgagacacgaaatatcggcgtttcatttccgctttggtgtgatgcaacggttggaaaaaagatttcatttgtcagcaagaacaagatagaactcgacttactacttaaacaacactatttcgtccaaatggaacaacttcaatactttcatatatccaacactgttctcgtcccagaagattgtacatacgtttcctttagacgctgtcaatctatagataagctcacagcagcagggctggcaaggaaaatcagacgcctggagaaacgtgctctatctagaggcgagcaatttgacccatcatcttttgctcaaaaagagcatactgcaatagcgcactaccactcacttggggagtccagcaaacagacgaaccgcaactttcgactcaatatcaggatgctctcggagcaaccccgtgaggggaactcgatttttagtagctatggcttatcaaattcagaaaactcgtttcagcctgtacccttaatctgacctttaataaggagatataccatggcgacaagtttacctacgccctcagcaattacgacttcggcgttagagtatgcattccatactcccgctcgcaatctaacgaaatctcgcggaaaaaacattcatcgttatgtcagtgtaaagatgagtaagaggattacggtagaatctactctagagtgtgatgcctgctatcactttgattttgagccaagtattgttcgcttttgcgctcaaccgattcgatttttatattatctcaatggtcagtctcactcctatgttcctgactttctagttcaatttgataccaacgagtttgttctatatgaagtaaagtcagcttatgctaagaacaaacctgattttgatgttgaatgggaggcgaaagtaaaagcagcaactgaactagggctagaattggagcttgttgaagagagtgatattagggatacggttgtattaaataatcttaagcgcatgcatcgttatgcttcgaaagatgagctgaataacgtacataactctctcttaaaaataataaagtacaatggcgcccaatctgcaagatgcttgggagaacagttgggtttaaaaggccgaactgttttaccaattttgtgcgatttgctgtcaaggtgtttactcgatacacgtttggataagcctctatctcttgaatctcgatttgagttggccagttatggctaagaaagggttctcaagtttccatagaaaagcagtctcttcccaagatacgcttgaatcgatagagcttgtctctagcgctaattgtctagaaagtgttacgtatcaagatatatcagcatttcccgaaacaattgcggtagagattaatttccgattaagcattcttcgctttttagcgcgaaagtgcgaaaccattgtggccaaatcaattgaaccacatcgtgtagagctacagcaaaactatagtagaaaaatacccagtgcaataacgatatatcgatggtggcttgcttttcgaaaatcagactacaaccccattagcttagcacctaatatcaaggatagaggtaatagagagacaaaagtgtcaacagttgttgattctattatggaacaggcagttgaaagagttatatctggacgaaaagtcaatgttagctctgcatataaacgtgttcgacgaaaagttcgtcaatacaatctaactcatggaacgaaatacacgtatcctaagtacgaatctgtaagaaagcgagtaaaaaagaaaaccccatttgagttattagccgcagggaaaggggagagagtagctaagagagagtttcgccgaatgggaaaaaagatcctcacgtctagcgtgctagagagggttgaaatagatcacactgtcgttgacctttttgcagtacacgaagagtatcgaatcccattgggccgaccttggcttactcaattggttgattgttacagtaaagctgtaatcggtttttatttaggtttcgagcctcctagctatgtgtcggtttcccttgcacttaagaatgcaatacaacgcaaagatgacttaatctcctcgtatgaatcgatcgagaatgaatggctatgttatggcatcccagacctactcgtaactgataatggtaaagagtttttgtcgaaagcatttgatcaagcatgtgaatcactattgatcaatgtgcatcaaaataaagttgagacgcccgacaacaaacctcatgttgaacgtaactacgggactattaatacttctctgttagacgatttacctgggaaatccttcagccagtaccttcaaagagaagggtacgactctgtgggagaagctacccttacactcaatgagattagagaaatttacttaatttggttggtggatatttatcataaaaaacccaatcagagaggcactaattgtcctaatgttgcgtggaaaaagggttgtcaagaatgggaaccagaggagttctctggttctaaagacgaattagactttaaatttgctattgttgattacaaacaacttactaaagtagggataactgtctacaaagaactgagttatagcaatgaccgtttagctgaatatagagggaagaaaggaaaccataaagttcagttcaagtataaccctgagtgtatggcagttatttgggtgttggatgaggatatgaatgagtactttacagttaatgcgattgactacgaatatgcaagtagagtatcactttggcaacataaatataacatgaaatatcaagcagaactaaattcagcagaatatgatgaggacaaggaaattgatgcagaaataaaaattgaagaaatcgcagatcgttcaattgttaagactaacaaaatcagagctcggaggcgtggcgctaggcatcaagagaatagcgcaagggctaagtcaatcagtaatgcgaacccggcctcgatacaaaaacatgaagatgaaatcgttagtgcagataatgacgattgggatattgattatgtctgagaaatcgtcaaatgagtgaaacgcgtgaggctcgtatatcaagagctaaaagggcatttgtatccacaccgagcgttaggaaaatcttgagttacatggatagatgtagagatctatcagacctagagtctgagcctacatgcatgatggtctatggtgcttcgggtgtaggtaaaacgaccgtcatcaagaaatacttaaatcaaaacagaagagagtccgaagccgggggcgatataataccggttttgcatattgagttgccagacaatgcgaagccagtagatgcagcaagggaattgctggttgaaatgggtgacccgctagcactttatgaaactgacttagctagattgacgaaaagactgactgaattaatccctgcggtcggcgtgaagctgattattatcgatgagttccaacatttggtggaagaaaggtcaaatcgggttcttacccaagtaggtaattggctaaaaatgatacttaacaaaacgaaatgtccaattgttatatttggtatgccatactcaaaagttgtactgcaagcaaactcgcaacttcacgggcgattttccattcaggttgaactgcgcccctttagctaccagggaggtagaggtgtatttaaaacttttttggaataccttgataaagccctaccttttgaaaaacaggctggcttagccaacgaaagtttgcagaaaaaattgtatgcattctctcagggaaacatgcgttcgttgagaaaccttatttatcaagcatctatcgaagcaattgataatcagcatgagacgataaccgaagaagatttcgtttttgcatcgaagttgacatcgggcgataaacccaactcatggaaaaatccttttgaggagggtgttgaggtaacagaagatatgttacgaccgccaccaaaagatattggttgggaggactatttgagacattcaaccccgagagtgagtaaaccaggtagaaataaaaactttttcgaataacctaggctgctgcgctgctgccaccgctgagcaataactagcataaccccttggggcctctaaacgggtcttgaggggttttttgctgaaacctcaggcattgaacctgcacggtacgccaggcatcaaattaagcagaaggccatcctgacggatggcctttttgcgtttctacaaactcttttgtttatttttctaaatacattcaaatatgtatccgctcatgagacaataaccctgataaatgcttcaataatattgaaaaaggaagagtatgagtattcaacatttccgtgtcgcccttattcccttttttgcggcattttgccttcctgtttttgctcacccagaaacgctggtgaaagtaaaagatgctgaagatcagttgggtgcacgagtgggttacatcgaactggatctcaacagcggtaagatccttgagagttttcgccccgaagaacgttttccaatgatgagcacttttaaagttctgctatgtggcgcggtattatcccgtgttgacgccgggcaagagcaactcggtcgccgcatacactattctcagaatgacttggttgagtactcaccagtcacagaaaagcatcttacggatggcatgacagtaagagaattatgcagtgctgccataaccatgagtgataacactgcggccaacttacttctgacaacgatcggaggaccgaaggagctaaccgcttttttgcacaacatgggggatcatgtaactcgccttgatcgttgggaaccggagctgaatgaagccataccaaacgacgagcgtgacaccacgatgcctgtagcaatggcaacaacgttgcgcaaactattaactggcgaactacttactctagcttcccggcaacaattaatagactggatggaggcggataaagttgcaggaccacttctgcgctcggcccttccggctggctggtttattgctgataaatctggagccggtgagcgtgggtctcgcggtatcattgcagcactggggccagatggtaagccctcccgtatcgtagttatctacacgacggggagtcaggcaactatggatgaacgaaatagacagatcgctgagataggtgcctcactgattaagcattggtaactgtcagaccaagtttactcatatatactttagattgatttctgaaagcgaccaggtgctcggcgtggcaagactcgcagcgaacccgtagaaagccatgctccagccgcccgcattggagaaattcttcaaattcccgttgcacatagcccggcaattcctttccctgctctgccataagcgcagcgaatgccgggtaatactcgtcaacgatctgatagagaagggtttgctcgggtcggtggctctggtaacgaccagtatcccgatcccggctggccgtcctggccgccacatgaggcatgttccgcgtccttgcaatactgtgtttacatacagtctatcgcttagcggaaagttcttttaccctcagccgaaatgcctgccgttgctagacattgccagccagtgcccgtcactcccgtactaactgtcacgaacccctgcaataactgtcacgcccccctgcaataactgtcacgaacccctgcaataactgtcacgcccccaaacctgcaaacccagcaggggcgggggctggcggggtgttggaaaaatccatccatgattatctaagaataatccactaggcgcggttatcagcgcccttgtggggcgctgctgcccttgcccaatatgcccggccagaggccggatagctggtctattcgctgcgctaggctacacaccgccccaccgctgcgcggcagggggaaaggcgggcaaagcccgctaaaccccacaccaaaccccgcagaaatacgctggagcgcttttagccgctttagcggcctttccccctacccgaagggtgggggcgcgtgtgcagccccgcagggcctgtctcggtcgatcattcagcccggctcatccttctggcgtggcggcagaccgaacaaggcgcggtcgtggtcgcgttcaaggtacgcatccattgccgccatgagccgatcctccggccactcgctgctgttcaccttggccaaaatcatggcccccaccagcaccttgcgccttgtttcgttcttgcgctcttgctgctgttcccttgcccgctcccgctgaatttcggcattgattcgcgctcgttgttcttcgagcttggccagccgatccgccgccttgttgctccccttaaccatcttgacaccccattgttaatgtgctgtctcgtaggctatcatggaggcacagcggcggcaatcccgaccctactttgtaggggagggcgcacttaccggtttctcttcgagaaactggcctaacggccacccttcgggcggtgcgctctccgagggccattgcatggagccgaaaagcaaaagcaacagcgaggcagcatggcgatttatcaccttacggcgaaaaccggcagcaggtcgggcggccaatcggccagggccaaggccgactacatccagcgcgaaggcaagtatgcccgcgacatggatgaagtcttgcacgccgaatccgggcacatgccggagttcgtcgagcggcccgccgactactgggatgctgccgacctgtatgaacgcgccaatgggcggctgttcaaggaggtcgaatttgccctgccggtcgagctgaccctcgaccagcagaaggcgctggcgtccgagttcgcccagcacctgaccggtgccgagcgcctgccgtatacgctggccatccatgccggtggcggcgagaacccgcactgccacctgatgatctccgagcggatcaatgacggcatcgagcggcccgccgctcagtggttcaagcggtacaacggcaagaccccggagaagggcggggcacagaagaccgaagcgctcaagcccaaggcatggcttgagcagacccgcgaggcatgggccgaccatgccaaccgggcattagagcgggctggccacgacgcccgcattgaccacagaacacttgaggcgcagggcatcgagcgcctgcccggtgttcacctggggccgaacgtggtggagatggaaggccggggcatccgcaccgaccgggcagacgtggccctgaacatcgacaccgccaacgcccagatcatcgacttacaggaataccgggaggcaatagaccatgaacgcaatcgacagagtgaagaaatccagaggcatcaacgagttagcggagcagatcgaaccgctggcccagagcatggcgacactggccgacgaagcccggcaggtcatgagccagaccaagcaggccagcgaggcgcaggcggcggagtggctgaaagcccagcgccagacaggggcggcatgggtggagctggccaaagagttgcgggaggtagccgccgaggtgagcagcgccgcgcagagcgcccggagcgcgtcgcgggggtggcactggaagctatggctaaccgtgatgctggcttccatgatgcctacggtggtgctgctgatcgcatcgttgctcttgctcgacctgacgccactgacaaccgaggacggctcgatctggctgcgcttggtggcccgatgaagaacgacaggactttgcaggccataggccgacagctcaaggccatgggctgtgagcgcttcgatatcggcgtcagggacgcacccaccggccagatgatgaaccgggaatggtcagccgccgaagtgctccagaacacgccatggctcaagcggatgaatgcccagggcaatgacgtgtatatcaggcccgccgagcaggagcggcatggtctggtgctggtggacgacctcagcgagtttgacctggatgacatgaaagccgagggccgggagcctgccctggtagtggaaaccagcccgaagaactatcaggcatgggtcaaggtggccgacgccgcaggcggtgaacttcgggggcagattgcccggacgctggccagcgagtacgacgccgacccggccagcgccgacagccgccactatggccgcttggcgggcttcaccaaccgcaaggacaagcacaccacccgcgccggttatcagccgtgggtgctgctgcgtgaatccaagggcaagaccgccaccgctggcccggcgctggtgcagcaggctggccagcagatcgagcaggcccagcggcagcaggagaaggcccgcaggctggccagcctcgaactgcccgagcggcagcttagccgccaccggcgcacggcgctggacgagtaccgcagcgagatggccgggctggtcaagcgcttcggtcatgacctcagcaagtgcgactttatcgccgcgcagaagctggccagccggggccgcagtgccgaggaaatcggcaaggccatggccgaggccagcccagcgctggcagagcgcaagcccggccacgaagcggattacatcgagcgcaccgtcagcaaggtcatgggtctgcccagcgtccagcttgcgcgggccgagctggcacgggcaccggcaccccgccagcgaggcatggacaggggcgggccagatttcagcatgtagtgcttgcgttggtactcacgcctgttatactatgagtactcacgcacagaagggggttttatggaatacgaaaaaagcgcttcagggtcggtctacctgatcaaaagtgacaagggctattggttgcccggtggctttggttatacgtcaaacaaggccgaggctggccgcttttcagtcgctgatatggccagccttaaccttgacggctgcaccttgtccttgttccgcgaagacaagcctttcggccccggcaagtttctcggtgactgatatgaaagaccaaaaggacaagcagaccggcgacctgctggccagccctgacgctgtacgccaagcgcgatatgccgagcgcatgaaggccaaagggatgcgtcagcgcaagttctggctgaccgacgacgaatacgaggcgctgcgcgagtgcctggaagaactcagagcggcgcagggcgggggtagtgaccccgccagcgcctaaccaccaactgcctgcaaaggaggcaatcaatggctacccataagcctatcaatattctggaggcgttcgcagcagcgccgccaccgctggactacgttttgcccaacatggtggccggtacggtcggggcgctggtgtcgcccggtggtgccggtaaatccatgctggccctgcaactggccgcacagattgcaggcgggccggatctgctggaggtgggcgaactgcccaccggcccggtgatctacctgcccgccgaagacccgcccaccgccattcatcaccgcctgcacgcccttggggcgcacctcagcgccgaggaacggcaagccgtggctgacggcctgctgatccagccgctgatcggcagcctgcccaacatcatggccccggagtggttcgacggcctcaagcgcgccgccgagggccgccgcctgatggtgctggacacgctgcgccggttccacatcgaggaagaaaacgccagcggccccatggcccaggtcatcggtcgcatggaggccatcgccgccgataccgggtgctctatcgtgttcctgcaccatgccagcaagggcgcggccatgatgggcgcaggcgaccagcagcaggccagccggggcagctcggtactggtcgataacatccgctggcagtcctacctgtcgagcatgaccagcgccgaggccgaggaatggggtgtggacgacgaccagcgccggttcttcgtccgcttcggtgtgagcaaggccaactatggcgcaccgttcgctgatcggtggttcaggcggcatgacggcggggtgctcaagcccgccgtgctggagaggcagcgcaagagcaagggggtgccccgtggtgaagcctaagaacaagcacagcctcagccacgtccggcacgacccggcgcactgtctggcccccggcctgttccgtgccctcaagcggggcgagcgcaagcgcagcaagctggacgtgacgtatgactacggcgacggcaagcggatcgagttcagcggcccggagccgctgggcgctgatgatctgcgcatcctgcaagggctggtggccatggctgggcctaatggcctagtgcttggcccggaacccaagaccgaaggcggacggcagctccggctgttcctggaacccaagtgggaggccgtcaccgctgaatgccatgtggtcaaaggtagctatcgggcgctggcaaaggaaatcggggcagaggtcgatagtggtggggcgctcaagcacatacaggactgcatcgagcgcctttggaaggtatccatcatcgcccagaatggccgcaagcggcaggggtttcggctgctgtcggagtacgccagcgacgaggcggacgggcgcctgtacgtggccctgaaccccttgatcgcgcaggccgtcatgggtggcggccagcatgtgcgcatcagcatggacgaggtgcgggcgctggacagcgaaaccgcccgcctgctgcaccagcggctgtgtggctggatcgaccccggcaaaaccggcaaggcttccatagataccttgtgcggctatgtctggccgtcagaggccagtggttcgaccatgcgcaagcgccgcaagcgggtgcgcgaggcgttgccggagctggtcgcgctgggctggacggtaaccgagttcgcggcgggcaagtacgacatcacccggcccaaggcggcaggctga

SEQ ID NO: 23 - DNA, 16748 bp, synthetic construct
  source 1..16748: mol_type = other DNA
ccccccccactctattgtaaacaagacatttttatcttttatattcaatggcttattttcctgctaattggtaataccatgaaaaataccatgctcagaaaaggcttaacaatattttgaaaaattgcctactgagcgctgccgcacagctccataggccgctttcctggctttgcttccagatgtatgctcttctgctcccgaacgaaggctctcaagggcatcggtcgcacgcttgtgttgacagctagctcagtcctaggtataatactagtcacgtgaactgccgagtaggtagctgataacgagacctctgtcttgtcagctagggtggtctcgtgaactgccgagtaggtagctgataactcgagagatccggctgctaacaaacccgcttaaggaagatggccaacttatttacataaggctgctgccaccgctgagcaataactagcataaccccttggggcctctaaacgggtcttgaggggttttttggtttaaacccatctaattgggaattccccctgcctcgcgcgtttcggtgatgacggtgaaaacctctgacacagcgatcgcttatgacaacttgacggctacatcattcactttttcttcacaaccggcacggaactcgctcgggctggccccggtgcattttttaaatacccgcgagaaatagagttgatcgtcaaaaccaacattgcgaccgacggtggcgataggcatccgggtggtgctcaaaagcagcttcgcctggctgatacgttggtcctcgcgccagcttaagacgctaatccctaactgctggcggaaaagatgtgacagacgcgacggcgacaagcaaacatgctgtgcgacgctggcgatatcaaaattgctgtctgccaggtgatcgctgatgtactgacaagcctcgcgtacccgattatccatcggtggatggagcgactcgttaatcgcttccatgcgccgcagtaacaattgctcaagcagatttatcgccagcagctccgaatagcgcccttccccttgcccggcgttaatgatttgcccaaacaggtcgctgaaatgcggctggtgcgcttcatccgggcgaaagaaccccgtattggcaaatattgacggccagttaagccattcatgccagtaggcgcgcggacgaaagtaaacccactggtgataccattcgcgagcctccggatgacgaccgtagtgatgaatctctcctggcgggaacagcaaaatatcacccggtcggcaaacaaattctcgtccctgatttttcaccaccccctgaccgcgaatggtgagattgagaatataacctttcattcccagcggtcggtcgataaaaaaatcgagataaccgttggcctcaatcggcgttaaacccgccaccagatgggcattaaacgagtatcccggcagcaggggatcattttgcgcttcagccatacttttcatactcccgccattcagagaagaaaccaattgtccatattgcatcagacattgccgtcactgcgtcttttactggctcttctcgctaaccaaaccggtaaccccgcttattaaaagcattctgtaacaaagcgggaccaaagccatgacaaaaacgcgtaacaaaagtgtctataatcacggcagaaaagtccacattgattatttgcacggcgtcacactttgctatgccatagcatttttatccataagattagcggatcctacctgacgctttttatcgcaactctctactgtttctccatacccgggatccgaattcgagcgaaggagatatacatatgtttttgcaaagacctaaaccttacagcgatgaaagtttagaaagtttctttatccgagtggctaacaaaaatggctacggtgatgtccatcgcttcctagaagccactaaacgattccttcaagacattgaccataatggctatcaaacctttccgactgatataactcggataaacccatactcagctaaaaacagttccagcgcacgaactgcgtcattcctgaaacttgcacaattgacatttaatgaaccgccagagctacttgggttggcaattaacagaacaaacatgaaatactcgccgtcaactagcgcggttgttagaggtgcagaagtctttcctcgcagtttactacggacgcactccatcccctgctgtcctttgtgtctgcgagaaaatggctacgcctcctacctttggcactttcaggggtacgaatactgccacagccataacgtacctttaattaccacttgtagctgtggtaaggagtttgactaccgagtatctgggttaaagggcatttgctgcaaatgcaaggagcctatcaccttaaccagcagggagaacggtcatgaggcagcgtgtactgtttcaaactggcttgctggccatgaatctaaacctctgccaaatcttcctaaaagctaccgatggggtttagttcattggtggatgggtattaaagatagcgagttcgatcacttttcgttcgttcaatttttctcaaactggccaaggtcattccactcgataatcgaagatgaagtagagttcaaccttgagcatgctgttgtcagcacgtctgaattacgactaaaagatcttcttggtcgattgtttttcggttcaattcggttacctgagcggaatcttcaacacaatatcatccttggtgagcttctctgctatttagaaaatcgtttatggcaagacaagggattaatcgccaacctcaaaatgaacgcgttagaggcgactgtaatgttaaattgtagcctcgatcagattgcatcaatggttgaacaacgcatcttgaagccaaatcgaaaaagcaagcccaacagccctcttgatgttaccgattatctatttcatttcggcgatattttctgtctttggttagctgagttccaaagcgatgagtttaaccgttcgttttatgtgtcgaggtggtaaatgcaaactctgaaagaactaatcgcatccaatcctgacgacttaacaactgaacttaagagagcatttcgtccactcacaccgcatattgcaattgatggtaatgaacttgacgcactgacgatattagtcaatttaaccgataagactgatgatcagaaagacctgctcgatcgagccaaatgcaagcaaaaacttcgagatgaaaaatggtgggctagctgcataaattgcgttaattacagacaaagccataacccaaaattcccggatatacgttctgaaggcgtgattcgaacccaagccctgggtgaattaccgagtttcctactctcgtcctcaaaaatcccaccataccattggtcatatagccatgattcaaaatacgtcaacaaaagcgcattcctcaccaatgagttttgttgggatggtgagatctcatgtttgggtgagcttcttaaagatgcagatcacccactttggaatactttgaaaaagttaggttgttctcaaaaaacttgcaaagcaatggcaaaacaactagctgatattactctcacgactatcaatgtcacactcgcaccaaattacctgactcaaatatctctccccgatagtgatacatcctacatttcactctctcctgttgcatcgctatcgatgcaaagccactttcatcagaggctccaagatgaaaatcggcatagcgcgataacgcggtttagccgaactaccaacatgggggtcactgcgatgacatgtggcggcgcatttagaatgttaaagtctggcgctaagttttccagcccccctcatcaccgattaaacagtaaacgaagttggttgacgtcagagcatgttcagtcattaaaacagtaccagcgcctcaacaaaagcctcatacctgaaaactctcggattgcactccgtagaaaatacaaaatcgagcttcaaaatatggtcagatcttggtttgcaatgcaagaccatacccttgattcgaacatacttatccaacatttgaatcatgacctatcttacttaggagccacaaaacgttttgcatacgatccagcgatgaccaagctctttactgagcttttgaaacgagagttatcaaattcaatcaataatggtgagcaacacactaatggatcgtttttagtcctaccgaatatcagggtttgtggcgcaacagctttaagctccccggtaacggtggggattccatcacttacagctttctttggcttcgttcacgcatttgaacggaatataaatcgcaccacctcatcgtttcgtgttgaatcctttgcgatatgcgtccatcaactacatgtcgagaagcgaggtttgacagcagagtttgtggaaaaaggcgacgggactatatccgctcccgcgacccgggatgactggcagtgtgatgtcgtatttagccttattttgaacaccaactttgctcaacatattgaccaagatacgttagttacatcactaccaaagcgattggctcggggttcagcaaaaattgcgattgatgactttaaacatatcaactcattctcgacattagaaacagcgatcgaatctctgccaatagaagctggtaggtggttatcactttacgcacagtcaaacaataatctaagtgatctattagcagccatgacagaggaccatcagctcatggcaagctgcgtcggttaccacttgttagaagagcccaaagataaaccaaactccctcagaggttacaaacacgctatcgccgagtgcatcattggactcattaactcaatcacctttagctcagagactgatcccaacacaatcttttggtcgctaaagaactatcaaaactacctagtggtacagccaaggagtatcaacgatgaaactaccgacaaatctagcctatgagcgctctatcgacccatcagatgtctgtttttttgtcgtctggcccgatgatagaaaaacacctttaacctacaattctcgtactctgctcgggcaaatggaagcggcatcattagcctatgatgtctcaggtcaaccaataaaaagtgccaccgctgaggcgttagctcaagggaaccctcatcaagttgatttctgccacgttccatacggtgcgagtcatattgaatgcagtttctccgtctcgttttcttctgaactacgtcaaccatataagtgtaactcaagcaaagttaaacaaacgctagtgcaattagtcgagctctacgaaacgaaaatcggctggactgagctagcaacccgatatttgatgaacatttgcaacggtaaatggctgtggaaaaatacccgtaaagcctattgctggaacattgtacttacaccttggccttggaacggggaaaaggttggatttgaagatattcgtactaactacacctcacggcaagactttaaaaataataaaaattggtctgctatagttgaaatgatcaaaaccgcattttctagtactgatgggctggcgatatttgaagtcagggccaccttgcacttgccaacgaatgctatggtgcggccaagccaagttttcacagaaaaagaaagtggcagtaaaagtaaatctaaaactcaaaacagtcgagtttttcagagtacaactattgatggtgaacgatcgccaatactaggggcctttaaaacgggagcagctattgcaaccattgacgactggtatcctgaagccactgagccactaagggtcggacggtttggggttcatcgcgaagatgtcacttgctaccgtcatccgtctaccggaaaagattttttctcgatattacaacaagcagagcactatattgaagtgttgagcgccaacaaaactcccgctcaagaaactatcaacgacatgcactttttaatggctaacctgattaagggtgggatgttccagcataaaggagactgactgtgaaatggtattataagacaatcacctttctgccagagttgtgcaacaacgagtcactggctgcaaagtgtctccgcgttctgcatggatttaactatcagtatgagacacgaaatatcggcgtttcatttccgctttggtgtgatgcaacggttggaaaaaagatttcatttgtcagcaagaacaagatagaactcgacttactacttaaacaacactatttcgtccaaatggaacaacttcaatactttcatatatccaacactgttctcgtcccagaagattgtacatacgtttcctttagacgctgtcaatctatagataagctcacagcagcagggctggcaaggaaaatcagacgcctggagaaacgtgctctatctagaggcgagcaatttgacccatcatcttttgctcaaaaagagcatactgcaatagcgcactaccactcacttggggagtccagcaaacagacgaaccgcaactttcgactcaatatcaggatgctctcggagcaaccccgtgaggggaactcgatttttagtagctatggcttatcaaattcagaaaactcgtttcagcctgtacccttaatctgacctttaataaggagatataccatggcgacaagtttacctacgccctcagcaattacgacttcggcgttagagtatgcattccatactcccgctcgcaatctaacgaaatctcgcggaaaaaacattcatcgttatgtcagtgtaaagatgagtaagaggattacggtagaatctactctagagtgtgatgcctgctatcactttgattttgagccaagtattgttcgcttttgcgctcaaccgattcgatttttatattatctcaatggtcagtctcactcctatgttcctgactttctagttcaatttgataccaacgagtttgttctatatgaagtaaagtcagcttatgctaagaacaaacctgattttgatgttgaatgggaggcgaaagtaaaagcagcaactgaactagggctagaattggagcttgttgaagagagtgatattagggatacggttgtattaaataatcttaagcgcatgcatcgttatgcttcgaaagatgagctgaataacgtacataactctctcttaaaaataataaagtacaatggcgcccaatctgcaagatgcttgggagaacagttgggtttaaaaggccgaactgttttaccaattttgtgcgatttgctgtcaaggtgtttactcgatacacgtttggataagcctctatctcttgaatctcgatttgagttggccagttatggctaagaaagggttctcaagtttccatagaaaagcagtctcttcccaagatacgcttgaatcgatagagcttgtctctagcgctaattgtctagaaagtgttacgtatcaagatatatcagcatttcccgaaacaattgcggtagagattaatttccgattaagcattcttcgctttttagcgcgaaagtgcgaaaccattgtggccaaatcaattgaaccacatcgtgtagagctacagcaaaactatagtagaaaaatacccagtgcaataacgatatatcgatggtggcttgcttttcgaaaatcagactacaaccccattagcttagcacctaatatcaaggatagaggtaatagagagacaaaagtgtcaacagttgttgattctattatggaacaggcagttgaaagagttatatctggacgaaaagtcaatgttagctctgcatataaacgtgttcgacgaaaagttcgtcaatacaatctaactcatggaacgaaatacacgtatcctaagtacgaatctgtaagaaagcgagtaaaaaagaaaaccccatttgagttattagccgcagggaaaggggagagagtagctaagagagagtttcgccgaatgggaaaaaagatcctcacgtctagcgtgctagagagggttgaaatagatcacactgtcgttgacctttttgcagtacacgaagagtatcgaatcccattgggccgaccttggcttactcaattggttgattgttacagtaaagctgtaatcggtttttatttaggtttcgagcctcctagctatgtgtcggtttcccttgcacttaagaatgcaatacaacgcaaagatgacttaatctcctcgtatgaatcgatcgagaatgaatggctatgttatggcatcccagacctactcgtaactgataatggtaaagagtttttgtcgaaagcatttgatcaagcatgtgaatcactattgatcaatgtgcatcaaaataaagttgagacgcccgacaacaaacctcatgttgaacgtaactacgggactattaatacttctctgttagacgatttacctgggaaatccttcagccagtaccttcaaagagaagggtacgactctgtgggagaagctacccttacactcaatgagattagagaaatttacttaatttggttggtggatatttatcataaaaaacccaatcagagaggcactaattgtcctaatgttgcgtggaaaaagggttgtcaagaatgggaaccagaggagttctctggttctaaagacgaattagactttaaatttgctattgttgattacaaacaacttactaaagtagggataactgtctacaaagaactgagttatagcaatgaccgtttagctgaatatagagggaagaaaggaaaccataaagttcagttcaagtataaccctgagtgtatggcagttatttgggtgttggatgaggatatgaatgagtactttacagttaatgcgattgactacgaatatgcaagtagagtatcactttggcaacataaatataacatgaaatatcaagcagaactaaattcagcagaatatgatgaggacaaggaaattgatgcagaaataaaaattgaagaaatcgcagatcgttcaattgttaagactaacaaaatcagagctcggaggcgtggcgctaggcatcaagagaatagcgcaagggctaagtcaatcagtaatgcgaacccggcctcgatacaaaaacatgaagatgaaatcgttagtgcagataatgacgattgggatattgattatgtctgagaaatcgtcaaatgagtgaaacgcgtgaggctcgtatatcaagagctaaaagggcatttgtatccacaccgagcgttaggaaaatcttgagttacatggatagatgtagagatctatcagacctagagtctgagcctacatgcatgatggtctatggtgcttcgggtgtaggtaaaacgaccgtcatcaagaaatacttaaatcaaaacagaagagagtccgaagccgggggcgatataataccggttttgcatattgagttgccagacaatgcgaagccagtagatgcagcaagggaattgctggttgaaatgggtgacccgctagcactttatgaaactgacttagctagattgacgaaaagactgactgaattaatccctgcggtcggcgtgaagctgattattatcgatgagttccaacatttggtggaagaaaggtcaaatcgggttcttacccaagtaggtaattggctaaaaatgatacttaacaaaacgaaatgtccaattgttatatttggtatgccatactcaaaagttgtactgcaagcaaactcgcaacttcacgggcgattttccattcaggttgaactgcgcccctttagctaccagggaggtagaggtgtatttaaaacttttttggaataccttgataaagccctaccttttgaaaaacaggctggcttagccaacgaaagtttgcagaaaaaattgtatgcattctctcagggaaacatgcgttcgttgagaaaccttatttatcaagcatctatcgaagcaattgataatcagcatgagacgataaccgaagaagatttcgtttttgcatcgaagttgacatcgggcgataaacccaactcatggaaaaatccttttgaggagggtgttgaggtaacagaagatatgttacgaccgccaccaaaagatattggttgggaggactatttgagacattcaaccccgagagtgagtaaaccaggtagaaataaaaactttttcgaataacctaggctgctgcgctgctgccaccgctgagcaataactagcataaccccttggggcctctaaacgggtcttgaggggttttttgctgaaacctcggtaccaagctttttgtttatttttctaaatacattcaaatatgtatccgctcatgagacaataaccctgataaatgcttcaataatattgaaaaaggaagagtatgagccatattcaacgggaaacgtcttgctctaggccgcgattaaattccaacatggatgctgatttatatgggtataaatgggctcgcgataatgtcgggcaatcaggtgcgacaatctatcgattgtatgggaagcccgatgcgccagagttgtttctgaaacatggcaaaggtagcgttgccaatgatgttacagatgagatggtcagactaaactggctgacggaatttatgcctcttccgaccatcaagcattttatccgtactcctgatgatgcatggttactcaccactgcgatccccgggaaaacagcattccaggtattagaagaatatcctgattcaggtgaaaatattgttgatgcgctggcagtgttcctgcgccggttgcattcgattcctgtttgtaattgtccttttaacagcgaccgcgtatttcgtctcgctcaggcgcaatcacgaatgaataacggtttggttgatgcgagtgattttgatgacgagcgtaatggctggcctgttgaacaagtctggaaagaaatgcataaacttttgccattctcaccggattcagtcgtcactcatggtgatttctcacttgataaccttatttttgacgaggggaaattaataggttgtattgatgttggacgagtcggaatcgcagaccgataccaggatcttgccatcctatggaactgcctcggtgagttttctccttcattacagaaacggctttttcaaaaatatggtattgataatcctgatatgaataaattgcagtttcatttgatgctcgatgagtttttctaattaattaactgtcagaccaagtttactcatatatactttagattgatttctgaaagcgaccaggtgctcggcgtggcaagactcgcagcgaacccgtagaaagccatgctccagccgcccgcattggagaaattcttcaaattcccgttgcacatagcccggcaattcctttccctgctctgccataagcgcagcgaatgccgggtaatactcgtcaacgatctgatagagaagggtttgctcgggtcggtggctctggtaacgaccagtatcccgatcccggctggccgtcctggccgccacatgaggcatgttccgcgtccttgcaatactgtgtttacatacagtctatcgcttagcggaaagttcttttaccctcagccgaaatgcctgccgttgctagacattgccagccagtgcccgtcactcccgtactaactgtcacgaacccctgcaataactgtcacgcccccctgcaataactgtcacgaacccctgcaataactgtcacgcccccaaacctgcaaacccagcaggggcgggggctggcggggtgttggaaaaatccatccatgattatctaagaataatccactaggcgcggttatcagcgcccttgtggggcgctgctgcccttgcccaatatgcccggccagaggccggatagctggtctattcgctgcgctaggctacacaccgccccaccgctgcgcggcagggggaaaggcgggcaaagcccgctaaaccccacaccaaaccccgcagaaatacgctggagcgcttttagccgctttagcggcctttccccctacccgaagggtgggggcgcgtgtgcagccccgcagggcctgtctcggtcgatcattcagcccggctcatccttctggcgtggcggcagaccgaacaaggcgcggtcgtggtcgcgttcaaggtacgcatccattgccgccatgagccgatcctccggccactcgctgctgttcaccttggccaaaatcatggcccccaccagcaccttgcgccttgtttcgttcttgcgctcttgctgctgttcccttgcccgctcccgctgaatttcggcattgattcgcgctcgttgttcttcgagcttggccagccgatccgccgccttgttgctccccttaaccatcttgacaccccattgttaatgtgctgtctcgtaggctatcatggaggcacagcggcggcaatcccgaccctactttgtaggggagggcgcacttaccggtttctcttcgagaaactggcctaacggccacccttcgggcggtgcgctctccgagggccattgcatggagccgaaaagcaaaagcaacagcgaggcagcatggcgatttatcaccttacggcgaaaaccggcagcaggtcgggcggccaatcggccagggccaaggccgactacatccagcgcgaaggcaagtatgcccgcgacatggatgaagtcttgcacgccgaatccgggcacatgccggagttcgtcgagcggcccgccgactactgggatgctgccgacctgtatgaacgcgccaatgggcggctgttcaaggaggtcgaatttgccctgccggtcgagctgaccctcgaccagcagaaggcgctggcgtccgagttcgcccagcacctgaccggtgccgagcgcctgccgtatacgctggccatccatgccggtggcggcgagaacccgcactgccacctgatgatctccgagcggatcaatgacggcatcgagcggcccgccgctcagtggttcaagcggtacaacggcaagaccccggagaagggcggggcacagaagaccgaagcgctcaagcccaaggcatggcttgagcagacccgcgaggcatgggccgaccatgccaaccgggcattagagcgggctggccacgacgcccgcattgaccacagaacacttgaggcgcagggcatcgagcgcctgcccggtgttcacctggggccgaacgtggtggagatggaaggccggggcatccgcaccgaccgggcagacgtggccctgaacatcgacaccgccaacgcccagatcatcgacttacaggaataccgggaggcaatagaccatgaacgcaatcgacagagtgaagaaatccagaggcatcaacgagttagcggagcagatcgaaccgctggcccagagcatggcgacactggccgacgaagcccggcaggtcatgagccagaccaagcaggccagcgaggcgcaggcggcggagtggctgaaagcccagcgccagacaggggcggcatgggtggagctggccaaagagttgcgggaggtagccgccgaggtgagcagcgccgcgcagagcgcccggagcgcgtcgcgggggtggcactggaagctatggctaaccgtgatgctggcttccatgatgcctacggtggtgctgctgatcgcatcgttgctcttgctcgacctgacgccactgacaaccgaggacggctcgatctggctgcgcttggtggcccgatgaagaacgacaggactttgcaggccataggccgacagctcaaggccatgggctgtgagcgcttcgatatcggcgtcagggacgcacccaccggccagatgatgaaccgggaatggtcagccgccgaagtgctccagaacacgccatggctcaagcggatgaatgcccagggcaatgacgtgtatatcaggcccgccgagcaggagcggcatggtctggtgctggtggacgacctcagcgagtttgacctggatgacatgaaagccgagggccgggagcctgccctggtagtggaaaccagcccgaagaactatcaggcatgggtcaaggtggccgacgccgcaggcggtgaacttcgggggcagattgcccggacgctggccagcgagtacgacgccgacccggccagcgccgacagccgccactatggccgcttggcgggcttcaccaaccgcaaggacaagcacaccacccgcgccggttatcagccgtgggtgctgctgcgtgaatccaagggcaagaccgccaccgctggcccggcgctggtgcagcaggctggccagcagatcgagcaggcccagcggcagcaggagaaggcccgcaggctggccagcctcgaactgcccgagcggcagcttagccgccaccggcgcacggcgctggacgagtaccgcagcgagatggccgggctggtcaagcgcttcggtcatgacctcagcaagtgcgactttatcgccgcgcagaagctggccagccggggccgcagtgccgaggaaatcggcaaggccatggccgaggccagcccagcgctggcagagcgcaagcccggccacgaagcggattacatcgagcgcaccgtcagcaaggtcatgggtctgcccagcgtccagcttgcgcgggccgagctggcacgggcaccggcaccccgccagcgaggcatggacaggggcgggccagatttcagcatgtagtgcttgcgttggtactcacgcctgttatactatgagtactcacgcacagaagggggttttatggaatacgaaaaaagcgcttcagggtcggtctacctgatcaaaagtgacaagggctattggttgcccggtggctttggttatacgtcaaacaaggccgaggctggccgcttttcagtcgctgatatggccagccttaaccttgacggctgcaccttgtccttgttccgcgaagacaagcctttcggccccggcaagtttctcggtgactgatatgaaagaccaaaaggacaagcagaccggcgacctgctggccagccctgacgctgtacgccaagcgcgatatgccgagcgcatgaaggccaaagggatgcgtcagcgcaagttctggctgaccgacgacgaatacgaggcgctgcgcgagtgcctggaagaactcagagcggcgcagggcgggggtagtgaccccgccagcgcctaaccaccaactgcctgcaaaggaggcaatcaatggctacccataagcctatcaatattctggaggcgttcgcagcagcgccgccaccgctggactacgttttgcccaacatggtggccggtacggtcggggcgctggtgtcgcccggtggtgccggtaaatccatgctggccctgcaactggccgcacagattgcaggcgggccggatctgctggaggtgggcgaactgcccaccggcccggtgatctacctgcccgccgaagacccgcccaccgccattcatcaccgcctgcacgcccttggggcgcacctcagcgccgaggaacggcaagccgtggctgacggcctgctgatccagccgctgatcggcagcctgcccaacatcatggccccggagtggttcgacggcctcaagcgcgccgccgagggccgccgcctgatggtgctggacacgctgcgccggttccacatcgaggaagaaaacgccagcggccccatggcccaggtcatcggtcgcatggaggccatcgccgccgataccgggtgctctatcgtgttcctgcaccatgccagcaagggcgcggccatgatgggcgcaggcgaccagcagcaggccagccggggcagctcggtactggtcgataacatccgctggcagtcctacctgtcgagcatgaccagcgccgaggccgaggaatggggtgtggacgacgaccagcgccggttcttcgtccgcttcggtgtgagcaaggccaactatggcgcaccgttcgctgatcggtggttcaggcggcatgacggcggggtgctcaagcccgccgtgctggagaggcagcgcaagagcaagggggtgccccgtggtgaagcctaagaacaagcacagcctcagccacgtccggcacgacccggcgcactgtctggcccccggcctgttccgtgccctcaagcggggcgagcgcaagcgcagcaagctggacgtgacgtatgactacggcgacggcaagcggatcgagttcagcggcccggagccgctgggcgctgatgatctgcgcatcctgcaagggctggtggccatggctgggcctaatggcctagtgcttggcccggaacccaagaccgaaggcggacggcagctccggctgttcctggaacccaagtgggaggccgtcaccgctgaatgccatgtggtcaaaggtagctatcgggcgctggcaaaggaaatcggggcagaggtcgatagtggtggggcgctcaagcacatacaggactgcatcgagcgcctttggaaggtatccatcatcgcccagaatggccgcaagcggcaggggtttcggctgctgtcggagtacgccagcgacgaggcggacgggcgcctgtacgtggccctgaaccccttgatcgcgcaggccgtcatgggtggcggccagcatgtgcgcatcagcatggacgaggtgcgggcgctggacagcgaaaccgcccgcctgctgcaccagcggctgtgtggctggatcgaccccggcaaaaccggcaaggcttccatagataccttgtgcggctatgtctggccgtcagaggccagtggttcgaccatgcgcaagcgccgcaagcgggtgcgcgaggcgttgccggagctggtcgcgctgggctggacggtaaccgagttcgcggcgggcaagtacgacatcacccggcccaaggcggcaggctga

SEQ ID NO: 24 - DNA, 16748 bp, synthetic construct
  source 1..16748: mol_type = other DNA
ccccccccactctattgtaaacaagacatttttatcttttatattcaatggcttattttcctgctaattggtaataccatgaaaaataccatgctcagaaaaggcttaacaatattttgaaaaattgcctactgagcgctgccgcacagctccataggccgctttcctggctttgcttccagatgtatgctcttctgctcccgaacgaaggctctcaagggcatcggtcgcacgcttgtgttgacagctagctcagtcctaggtataatactagtcacgtgaactgccgagtaggtagctgataacgtgctaaaggggaccgacgttgaccagcctcggtgaactgccgagtaggtagctgataactcgagagatccggctgctaacaaacccgcttaaggaagatggccaacttatttacataaggctgctgccaccgctgagcaataactagcataaccccttggggcctctaaacgggtcttgaggggttttttggtttaaacccatctaattgggaattccccctgcctcgcgcgtttcggtgatgacggtgaaaacctctgacacagcgatcgcttatgacaacttgacggctacatcattcactttttcttcacaaccggcacggaactcgctcgggctggccccggtgcattttttaaatacccgcgagaaatagagttgatcgtcaaaaccaacattgcgaccgacggtggcgataggcatccgggtggtgctcaaaagcagcttcgcctggctgatacgttggtcctcgcgccagcttaagacgctaatccctaactgctggcggaaaagatgtgacagacgcgacggcgacaagcaaacatgctgtgcgacgctggcgatatcaaaattgctgtctgccaggtgatcgctgatgtactgacaagcctcgcgtacccgattatccatcggtggatggagcgactcgttaatcgcttccatgcgccgcagtaacaattgctcaagcagatttatcgccagcagctccgaatagcgcccttccccttgcccggcgttaatgatttgcccaaacaggtcgctgaaatgcggctggtgcgcttcatccgggcgaaagaaccccgtattggcaaatattgacggccagttaagccattcatgccagtaggcgcgcggacgaaagtaaacccactggtgataccattcgcgagcctccggatgacgaccgtagtgatgaatctctcctggcgggaacagcaaaatatcacccggtcggcaaacaaattctcgtccctgatttttcaccaccccctgaccgcgaatggtgagattgagaatataacctttcattcccagcggtcggtcgataaaaaaatcgagataaccgttggcctcaatcggcgttaaacccgccaccagatgggcattaaacgagtatcccggcagcaggggatcattttgcgcttcagccatacttttcatactcccgccattcagagaagaaaccaattgtccatattgcatcagacattgccgtcactgcgtcttttactggctcttctcgctaaccaaaccggtaaccccgcttattaaaagcattctgtaacaaagcgggaccaaagccatgacaaaaacgcgtaacaaaagtgtctataatcacggcagaaaagtccacattgattatttgcacggcgtcacactttgctatgccatagcatttttatccataagattagcggatcctacctgacgctttttatcgcaactctctactgtttctccatacccgggatccgaattcgagcgaaggagatatacatatgtttttgcaaagacctaaaccttacagcgatgaaagtttagaaagtttctttatccgagtggctaacaaaaatggctacggtgatgtccatcgcttcctagaagccactaaacgattccttcaagacattgaccataatggctatcaaacctttccgactgatataactcggataaacccatactcagctaaaaacagttccagcgcacgaactgcgtcattcctgaaacttgcacaattgacatttaatgaaccgccagagctacttgggttggcaattaacagaacaaacatgaaatactcgccgtcaactagcgcggttgttagaggtgcagaagtctttcctcgcagtttactacggacgcactccatcccctgctgtcctttgtgtctgcgagaaaatggctacgcctcctacctttggcactttcaggggtacgaatactgccacagccataacgtacctttaattaccacttgtagctgtggtaaggagtttgactaccgagtatctgggttaaagggcatttgctgcaaatgcaaggagcctatcaccttaaccagcagggagaacggtcatgaggcagcgtgtactgtttcaaactggcttgctggccatgaatctaaacctctgccaaatcttcctaaaagctaccgatggggtttagttcattggtggatgggtattaaagatagcgagttcgatcacttttcgttcgttcaatttttctcaaactggccaaggtcattccactcgataatcgaagatgaagtagagttcaaccttgagcatgctgttgtcagcacgtctgaattacgactaaaagatcttcttggtcgattgtttttcggttcaattcggttacctgagcggaatcttcaacacaatatcatccttggtgagcttctctgctatttagaaaatcgtttatggcaagacaagggattaatcgccaacctcaaaatgaacgcgttagaggcgactgtaatgttaaattgtagcctcgatcagattgcatcaatggttgaacaacgcatcttgaagccaaatcgaaaaagcaagcccaacagccctcttgatgttaccgattatctatttcatttcggcgatattttctgtctttggttagctgagttccaaagcgatgagtttaaccgttcgttttatgtgtcgaggtggtaaatgcaaactctgaaagaactaatcgcatccaatcctgacgacttaacaactgaacttaagagagcatttcgtccactcacaccgcatattgcaattgatggtaatgaacttgacgcactgacgatattagtcaatttaaccgataagactgatgatcagaaagacctgctcgatcgagccaaatgcaagcaaaaacttcgagatgaaaaatggtgggctagctgcataaattgcgttaattacagacaaagccataacccaaaattcccggatatacgttctgaaggcgtgattcgaacccaagccctgggtgaattaccgagtttcctactctcgtcctcaaaaatcccaccataccattggtcatatagccatgattcaaaatacgtcaacaaaagcgcattcctcaccaatgagttttgttgggatggtgagatctcatgtttgggtgagcttcttaaagatgcagatcacccactttggaatactttgaaaaagttaggttgttctcaaaaaacttgcaaagcaatggcaaaacaactagctgatattactctcacgactatcaatgtcacactcgcaccaaattacctgactcaaatatctctccccgatagtgatacatcctacatttcactctctcctgttgcatcgctatcgatgcaaagccactttcatcagaggctccaagatgaaaatcggcatagcgcgataacgcggtttagccgaactaccaacatgggggtcactgcgatgacatgtggcggcgcatttagaatgttaaagtctggcgctaagttttccagcccccctcatcaccgattaaacagtaaacgaagttggttgacgtcagagcatgttcagtcattaaaacagtaccagcgcctcaacaaaagcctcatacctgaaaactctcggattgcactccgtagaaaatacaaaatcgagcttcaaaatatggtcagatcttggtttgcaatgcaagaccatacccttgattcgaacatacttatccaacatttgaatcatgacctatcttacttaggagccacaaaacgttttgcatacgatccagcgatgaccaagctctttactgagcttttgaaacgagagttatcaaattcaatcaataatggtgagcaacacactaatggatcgtttttagtcctaccgaatatcagggtttgtggcgcaacagctttaagctccccggtaacggtggggattccatcacttacagctttctttggcttcgttcacgcatttgaacggaatataaatcgcaccacctcatcgtttcgtgttgaatcctttgcgatatgcgtccatcaactacatgtcgagaagcgaggtttgacagcagagtttgtggaaaaaggcgacgggactatatccgctcccgcgacccgggatgactggcagtgtgatgtcgtatttagccttattttgaacaccaactttgctcaacatattgaccaagatacgttagttacatcactaccaaagcgattggctcggggttcagcaaaaattgcgattgatgactttaaacatatcaactcattctcgacattagaaacagcgatcgaatctctgccaatagaagctggtaggtggttatcactttacgcacagtcaaacaataatctaagtgatctattagcagccatgacagaggaccatcagctcatggcaagctgcgtcggttaccacttgttagaagagcccaaagataaaccaaactccctcagaggttacaaacacgctatcgccgagtgcatcattggactcattaactcaatcacctttagctcagagactgatcccaacacaatcttttggtcgctaaagaactatcaaaactacctagtggtacagccaaggagtatcaacgatgaaactaccgacaaatctagcctatgagcgctctatcgacccatcagatgtctgtttttttgtcgtctggcccgatgatagaaaaacacctttaacctacaattctcgtactctgctcgggcaaatggaagcggcatcattagcctatgatgtctcaggtcaaccaataaaaagtgccaccgctgaggcgttagctcaagggaaccctcatcaagttgatttctgccacgttccatacggtgcgagtcatattgaatgcagtttctccgtctcgttttcttctgaactacgtcaaccatataagtgtaactcaagcaaagttaaacaaacgctagtgcaattagtcgagctctacgaaacgaaaatcggctggactgagctagcaacccgatatttgatgaacatttgcaacggtaaatggctgtggaaaaatacccgtaaagcctattgctggaacattgtacttacaccttggccttggaacggggaaaaggttggatttgaagatattcgtactaactacacctcacggcaagactttaaaaataataaaaattggtctgctatagttgaaatgatcaaaaccgcattttctagtactgatgggctggcgatatttgaagtcagggccaccttgcacttgccaacgaatgctatggtgcggccaagccaagttttcacagaaaaagaaagtggcagtaaaagtaaatctaaaactcaaaacagtcgagtttttcagagtacaactattgatggtgaacgatcgccaatactaggggcctttaaaacgggagcagctattgcaaccattgacgactggtatcctgaagccactgagccactaagggtcggacggtttggggttcatcgcgaagatgtcacttgctaccgtcatccgtctaccggaaaagattttttctcgatattacaacaagcagagcactatattgaagtgttgagcgccaacaaaactcccgctcaagaaactatcaacgacatgcactttttaatggctaacctgattaagggtgggatgttccagcataaaggagactgactgtgaaatggtattataagacaatcacctttctgccagagttgtgcaacaacgagtcactggctgcaaagtgtctccgcgttctgcatggatttaactatcagtatgagacacgaaatatcggcgtttcatttccgctttggtgtgatgcaacggttggaaaaaagatttcatttgtcagcaagaacaagatagaactcgacttactacttaaacaacactatttcgtccaaatggaacaacttcaatactttcatatatccaacactgttctcgtcccagaagattgtacatacgtttcctttagacgctgtcaatctatagataagctcacagcagcagggctggcaaggaaaatcagacgcctggagaaacgtgctctatctagaggcgagcaatttgacccatcatcttttgctcaaaaagagcatactgcaatagcgcactaccactcacttggggagtccagcaaacagacgaaccgcaactttcgactcaatatcaggatgctctcggagcaaccccgtgaggggaactcgatttttagtagctatggcttatcaaattcagaaaactcgtttcagcctgtacccttaatctgacctttaataaggagatataccatggcgacaagtttacctacgccctcagcaattacgacttcggcgttagagtatgcattccatactcccgctcgcaatctaacgaaatctcgcggaaaaaacattcatcgttatgtcagtgtaaagatgagtaagaggattacggtagaatctactctagagtgtgatgcctgctatcactttgattttgagccaagtattgttcgcttttgcgctcaaccgattcgatttttatattatctcaatggtcagtctcactcctatgttcctgactttctagttcaatttgataccaacgagtttgttctatatgaagtaaagtcagcttatgctaagaacaaacctgattttgatgttgaatgggaggcgaaagtaaaagcagcaactgaactagggctagaattggagcttgttgaagagagtgatattagggatacggttgtattaaataatcttaagcgcatgcatcgttatgcttcgaaagatgagctgaataacgtacataactctctcttaaaaataataaagtacaatggcgcccaatctgcaagatgcttgggagaacagttgggtttaaaaggccgaactgttttaccaattttgtgcgatttgctgtcaaggtgtttactcgatacacgtttggataagcctctatctcttgaatctcgatttgagttggccagttatggctaagaaagggttctcaagtttccatagaaaagcagtctcttcccaagatacgcttgaatcgatagagcttgtctctagcgctaattgtctagaaagtgttacgtatcaagatatatcagcatttcccgaaacaattgcggtagagattaatttccgattaagcattcttcgctttttagcgcgaaagtgcgaaaccattgtggccaaatcaattgaaccacatcgtgtagagctacagcaaaactatagtagaaaaatacccagtgcaataacgatatatcgatggtggcttgcttttcgaaaatcagactacaaccccattagcttagcacctaatatcaaggatagaggtaatagagagacaaaagtgtcaacagttgttgattctattatggaacaggcagttgaaagagttatatctggacgaaaagtcaatgttagctctgcatataaacgtgttcgacgaaaagttcgtcaatacaatctaactcatggaacgaaatacacgtatcctaagtacgaatctgtaagaaagcgagtaaaaaagaaaaccccatttgagttattagccgcagggaaaggggagagagtagctaagagagagtttcgccgaatgggaaaaaagatcctcacgtctagcgtgctagagagggttgaaatagatcacactgtcgttgacctttttgcagtacacgaagagtatcgaatcccattgggccgaccttggcttactcaattggttgattgttacagtaaagctgtaatcggtttttatttaggtttcgagcctcctagctatgtgtcggtttcccttgcacttaagaatgcaatacaacgcaaagatgacttaatctcctcgtatgaatcgatcgagaatgaatggctatgttatggcatcccagacctactcgtaactgataatggtaaagagtttttgtcgaaagcatttgatcaagcatgtgaatcactattgatcaatgtgcatcaaaataaagttgagacgcccgacaacaaacctcatgttgaacgtaactacgggactattaatacttctctgttagacgatttacctgggaaatccttcagccagtaccttcaaagagaagggtacgactctgtgggagaagctacccttacactcaatgagattagagaaatttacttaatttggttggtggatatttatcataaaaaacccaatcagagaggcactaattgtcctaatgttgcgtggaaaaagggttgtcaagaatgggaaccagaggagttctctggttctaaagacgaattagactttaaatttgctattgttgattacaaacaacttactaaagtagggataactgtctacaaagaactgagttatagcaatgaccgtttagctgaatatagagggaagaaaggaaaccataaagttcagttcaagtataaccctgagtgtatggcagttatttgggtgttggatgaggatatgaatgagtactttacagttaatgcgattgactacgaatatgcaagtagagtatcactttggcaacataaatataacatgaaatatcaagcagaactaaattcagcagaatatgatgaggacaaggaaattgatgcagaaataaaaattgaagaaatcgcagatcgttcaattgttaagactaacaaaatcagagctcggaggcgtggcgctaggcatcaagagaatagcgcaagggctaagtcaatcagtaatgcgaacccggcctcgatacaaaaacatgaagatgaaatcgttagtgcagataatgacgattgggatattgattatgtctgagaaatcgtcaaatgagtgaaacgcgtgaggctcgtatatcaagagctaaaagggcatttgtatccacaccgagcgttaggaaaatcttgagttacatggatagatgtagagatctatcagacctagagtctgagcctacatgcatgatggtctatggtgcttcgggtgtaggtaaaacgaccgtcatcaagaaatacttaaatcaaaacagaagagagtccgaagccgggggcgatataataccggttttgcatattgagttgccagacaatgcgaagccagtagatgcagcaagggaattgctggttgaaatgggtgacccgctagcactttatgaaactgacttagctagattgacgaaaagactgactgaattaatccctgcggtcggcgtgaagctgattattatcgatgagttccaacatttggtggaagaaaggtcaaatcgggttcttacccaagtaggtaattggctaaaaatgatacttaacaaaacgaaatgtccaattgttatatttggtatgccatactcaaaagttgtactgcaagcaaactcgcaacttcacgggcgattttccattcaggttgaactgcgcccctttagctaccagggaggtagaggtgtatttaaaacttttttggaataccttgataaagccctaccttttgaaaaacaggctggcttagccaacgaaagtttgcagaaaaaattgtatgcattctctcagggaaacatgcgttcgttgagaaaccttatttatcaagcatctatcgaagcaattgataatcagcatgagacgataaccgaagaagatttcgtttttgcatcgaagttgacatcgggcgataaacccaactcatggaaaaatccttttgaggagggtgttgaggtaacagaagatatgttacgaccgccaccaaaagatattggttgggaggactatttgagacattcaaccccgagagtgagtaaaccaggtagaaataaaaactttttcgaataacctaggctgctgcgctgctgccaccgctgagcaataactagcataaccccttggggcctctaaacgggtcttgaggggttttttgctgaaacctcggtaccaagctttttgtttatttttctaaatacattcaaatatgtatccgctcatgagacaataaccctgataaatgcttcaataatattgaaaaaggaagagtatgagccatattcaacgggaaacgtcttgctctaggccgcgattaaattccaacatggatgctgatttatatgggtataaatgggctcgcgataatgtcgggcaatcaggtgcgacaatctatcgattgtatgggaagcccgatgcgccagagttgtttctgaaacatggcaaaggtagcgttgccaatgatgttacagatgagatggtcagactaaactggctgacggaatttatgcctcttccgaccatcaagcattttatccgtactcctgatgatgcatggttactcaccactgcgatccccgggaaaacagcattccaggtattagaagaatatcctgattcaggtgaaaatattgttgatgcgctggcagtgttcctgcgccggttgcattcgattcctgtttgtaattgtccttttaacagcgaccgcgtatttcgtctcgctcaggcgcaatcacgaatgaataacggtttggttgatgcgagtgattttgatgacgagcgtaatggctggcctgttgaacaagtctggaaagaaatgcataaacttttgccattctcaccggattcagtcgtcactcatggtgatttctcacttgataaccttatttttgacgaggggaaattaataggttgtattgatgttggacgagtcggaatcgcagaccgataccaggatcttgccatcctatggaactgcctcggtgagttttctccttcattacagaaacggctttttcaaaaatatggtattgataatcctgatatgaataaattgcagtttcatttgatgctcgatgagtttttctaattaattaactgtcagaccaagtttactcatatatactttagattgatttctgaaagcgaccaggtgctcggcgtggcaagactcgcagcgaacccgtagaaagccatgctccagccgcccgcattggagaaattcttcaaattcccgttgcacatagcccggcaattcctttccctgctctgccataagcgcagcgaatgccgggtaatactcgtcaacgatctgatagagaagggtttgctcgggtcggtggctctggtaacgaccagtatcccgatcccggctggccgtcctggccgccacatgaggcatgttccgcgtccttgcaatactgtgtttacatacagtctatcgcttagcggaaagttcttttaccctcagccgaaatgcctgccgttgctagacattgccagccagtgcccgtcactcccgtactaactgtcacgaacccctgcaataactgtcacgcccccctgcaataactgtcacgaacccctgcaataactgtcacgcccccaaacctgcaaacccagcaggggcgggggctggcggggtgttggaaaaatccatccatgattatctaagaataatccactaggcgcggttatcagcgcccttgtggggcgctgctgcccttgcccaatatgcccggccagaggccggatagctggtctattcgctgcgctaggctacacaccgccccaccgctgcgcggcagggggaaaggcgggcaaagcccgctaaaccccacaccaaaccccgcagaaatacgctggagcgcttttagccgctttagcggcctttccccctacccgaagggtgggggcgcgtgtgcagccccgcagggcctgtctcggtcgatcattcagcccggctcatccttctggcgtggcggcagaccgaacaaggcgcggtcgtggtcgcgttcaaggtacgcatccattgccgccatgagccgatcctccggccactcgctgctgttcaccttggccaaaatcatggcccccaccagcaccttgcgccttgtttcgttcttgcgctcttgctgctgttcccttgcccgctcccgctgaatttcggcattgattcgcgctcgttgttcttcgagcttggccagccgatccgccgccttgttgctccccttaaccatcttgacaccccattgttaatgtgctgtctcgtaggctatcatggaggcacagcggcggcaatcccgaccctactttgtaggggagggcgcacttaccggtttctcttcgagaaactggcctaacggccacccttcgggcggtgcgctctccgagggccattgcatggagccgaaaagcaaaagcaacagcgaggcagcatggcgatttatcaccttacggcgaaaaccggcagcaggtcgggcggccaatcggccagggccaaggccgactacatccagcgcgaaggcaagtatgcccgcgacatggatgaagtcttgcacgccgaatccgggcacatgccggagttcgtcgagcggcccgccgactactgggatgctgccgacctgtatgaacgcgccaatgggcggctgttcaaggaggtcgaatttgccctgccggtcgagctgaccctcgaccagcagaaggcgctggcgtccgagttcgcccagcacctgaccggtgccgagcgcctgccgtatacgctggccatccatgccggtggcggcgagaacccgcactgccacctgatgatctccgagcggatcaatgacggcatcgagcggcccgccgctcagtggttcaagcggtacaacggcaagaccccggagaagggcggggcacagaagaccgaagcgctcaagcccaaggcatggcttgagcagacccgcgaggcatgggccgaccatgccaaccgggcattagagcgggctggccacgacgcccgcattgaccacagaacacttgaggcgcagggcatcgagcgcctgcccggtgttcacctggggccgaacgtggtggagatggaaggccggggcatccgcaccgaccgggcagacgtggccctgaacatcgacaccgccaacgcccagatcatcgacttacaggaataccgggaggcaatagaccatgaacgcaatcgacagagtgaagaaatccagaggcatcaacgagttagcggagcagatcgaaccgctggcccagagcatggcgacactggccgacgaagcccggcaggtcatgagccagaccaagcaggccagcgaggcgcaggcggcggagtggctgaaagcccagcgccagacaggggcggcatgggtggagctggccaaagagttgcgggaggtagccgccgaggtgagcagcgccgcgcagagcgcccggagcgcgtcgcgggggtggcactggaagctatggctaaccgtgatgctggcttccatgatgcctacggtggtgctgctgatcgcatcgttgctcttgctcgacctgacgccactgacaaccgaggacggctcgatctggctgcgcttggtggcccgatgaagaacgacaggactttgcaggccataggccgacagctcaaggccatgggctgtgagcgcttcgatatcggcgtcagggacgcacccaccggccagatgatgaaccgggaatggtcagccgccgaagtgctccagaacacgccatggctcaagcggatgaatgcccagggcaatgacgtgtatatcaggcccgccgagcaggagcggcatggtctggtgctggtggacgacctcagcgagtttgacctggatgacatgaaagccgagggccgggagcctgccctggtagtggaaaccagcccgaagaactatcaggcatgggtcaaggtggccgacgccgcaggcggtgaacttcgggggcagattgcccggacgctggccagcgagtacgacgccgacccggccagcgccgacagccgccactatggccgcttggcgggcttcaccaaccgcaaggacaagcacaccacccgcgccggttatcagccgtgggtgctgctgcgtgaatccaagggcaagaccgccaccgctggcccggcgctggtgcagcaggctggccagcagatcgagcaggcccagcggcagcaggagaaggcccgcaggctggccagcctcgaactgcccgagcggcagcttagccgccaccggcgcacggcgctggacgagtaccgcagcgagatggccgggctggtcaagcgcttcggtcatgacctcagcaagtgcgactttatcgccgcgcagaagctggccagccggggccgcagtgccgaggaaatcggcaaggccatggccgaggccagcccagcgctggcagagcgcaagcccggccacgaagcggattacatcgagcgcaccgtcagcaaggtcatgggtctgcccagcgtccagcttgcgcgggccgagctggcacgggcaccggcaccccgccagcgaggcatggacaggggcgggccagatttcagcatgtagtgcttgcgttggtactcacgcctgttatactatgagtactcacgcacagaagggggttttatggaatacgaaaaaagcgcttcagggtcggtctacctgatcaaaagtgacaagggctattggttgcccggtggctttggttatacgtcaaacaaggccgaggctggccgcttttcagtcgctgatatggccagccttaaccttgacggctgcaccttgtccttgttccgcgaagacaagcctttcggccccggcaagtttctcggtgactgatatgaaagaccaaaaggacaagcagaccggcgacctgctggccagccctgacgctgtacgccaagcgcgatatgccgagcgcatgaaggccaaagggatgcgtcagcgcaagttctggctgaccgacgacgaatacgaggcgctgcgcgagtgcctggaagaactcagagcggcgcagggcgggggtagtgaccccgccagcgcctaaccaccaactgcctgcaaaggaggcaatcaatggctacccataagcctatcaatattctggaggcgttcgcagcagcgccgccaccgctggactacgttttgcccaacatggtggccggtacggtcggggcgctggtgtcgcccggtggtgccggtaaatccatgctggccctgcaactggccgcacagattgcaggcgggccggatctgctggaggtgggcgaactgcccaccggcccggtgatctacctgcccgccgaagacccgcccaccgccattcatcaccgcctgcacgcccttggggcgcacctcagcgccgaggaacggcaagccgtggctgacggcctgctgatccagccgctgatcggcagcctgcccaacatcatggccccggagtggttcgacggcctcaagcgcgccgccgagggccgccgcctgatggtgctggacacgctgcgccggttccacatcgaggaagaaaacgccagcggccccatggcccaggtcatcggtcgcatggaggccatcgccgccgataccgggtgctctatcgtgttcctgcaccatgccagcaagggcgcggccatgatgggcgcaggcgaccagcagcaggccagccggggcagctcggtactggtcgataacatccgctggcagtcctacctgtcgagcatgaccagcgccgaggccgaggaatggggtgtggacgacgaccagcgccggttcttcgtccgcttcggtgtgagcaaggccaactatggcgcaccgttcgctgatcggtggttcaggcggcatgacggcggggtgctcaagcccgccgtgctggagaggcagcgcaagagcaagggggtgccccgtggtgaagcctaagaacaagcacagcctcagccacgtccggcacgacccggcgcactgtctggcccccggcctgttccgtgccctcaagcggggcgagcgcaagcgcagcaagctggacgtgacgtatgactacggcgacggcaagcggatcgagttcagcggcccggagccgctgggcgctgatgatctgcgcatcctgcaagggctggtggccatggctgggcctaatggcctagtgcttggcccggaacccaagaccgaaggcggacggcagctccggctgttcctggaacccaagtgggaggccgtcaccgctgaatgccatgtggtcaaaggtagctatcgggcgctggcaaaggaaatcggggcagaggtcgatagtggtggggcgctcaagcacatacaggactgcatcgagcgcctttggaaggtatccatcatcgcccagaatggccgcaagcggcaggggtttcggctgctgtcggagtacgccagcgacgaggcggacgggcgcctgtacgtggccctgaaccccttgatcgcgcaggccgtcatgggtggcggccagcatgtgcgcatcagcatggacgaggtgcgggcgctggacagcgaaaccgcccgcctgctgcaccagcggctgtgtggctggatcgaccccggcaaaaccggcaaggcttccatagataccttgtgcggctatgtctggccgtcagaggccagtggttcgaccatgcgcaagcgccgcaagcgggtgcgcgaggcgttgccggagctggtcgcgctgggctggacggtaaccgagttcgcggcgggcaagtacgacatcacccggcccaaggcggcaggctga

SEQ ID NO: 25 - DNA, 9392 bp, synthetic construct
  source 1..9392: mol_type = other DNA
taaaaggattaagagattaatttccctaaaaatgataaaacaagcgttttgaaagcgcttgtttttttggtttgcagtcagatgcataatgtgcctgtcaaatggacgaagcagggattctgcaaaccctatgctactccgtcaagccgtcaattgtctgattcgttaccaattatgacaacttgacggctacatcattcactttttcttcacaaccggcacggaactcgctcgggctggccccggtgcattttttaaatacccgcgagaaatagagttgatcgtcaaaaccaacattgcgaccgacggtggcgataggcatccgggtggtgctcaaaagcagcttcgcctggctgatacgttggtcctcgcgccagcttaagacgctaatccctaactgctggcggaaaagatgtgacagacgcgacggcgacaagcaaacatgctgtgcgacgctggcgatatcaaaattgctgtctgccaggtgatcgctgatgtactgacaagcctcgcgtacccgattatccatcggtggatggagcgactcgttaatcgcttccatgcgccgcagtaacaattgctcaagcagatttatcgccagcagctccgaatagcgcccttccccttgcccggcgttaatgatttgcccaaacaggtcgctgaaatgcggctggtgcgcttcatccgggcgaaagaaccccgtattggcaaatattgacggccagttaagccattcatgccagtaggcgcgcggacgaaagtaaacccactggtgataccattcgcgagcctccggatgacgaccgtagtgatgaatctctcctggcgggaacagcaaaatatcacccggtcggcaaacaaattctcgtccctgatttttcaccaccccctgaccgcgaatggtgagattgagaatataacctttcattcccagcggtcggtcgataaaaaaatcgagataaccgttggcctcaatcggcgttaaacccgccaccagatgggcattaaacgagtatcccggcagcaggggatcattttgcgcttcagccatacttttcatactcccgccattcagagaagaaaccaattgtccatattgcatcagacattgccgtcactgcgtcttttactggctcttctcgctaaccaaaccggtaaccccgcttattaaaagcattctgtaacaaagcgggaccaaagccatgacaaaaacgcgtaacaaaagtgtctataatcacggcagaaaagtccacattgattatttgcacggcgtcacactttgctatgccatagcatttttatccataagattagcggatcctacctgacgctttttatcgcaactctctactgtttctccatacccgagctgtcaccggatgtgctttccggtctgatgagtccgtgaggacgaaacagtaatacgactcactataggggaattgtgagcggataacaattcccctctagaaataattttgtttaactttaagaaggagatataccatggcgcatcaccaccaccatcacggcgggagcagcaatttactgaccgtacaccaaaatttgcctgcattgccggtcgatgcaacgagtgatgaggttcgcaagaacctgatggacatgttcagggatcgccaggcgttttctgagcatacctggaaaatgcttctgtccgtttgccggtcgtgggcggcatggtgcaagttgaataaccggaaatggtttcccgcagaacctgaagatgttcgcgattatcttctatatcttcaggcgcgcggtctggcagtaaaaactatccagcaacatttgggccagctaaacatgcttcatcgtcggtccgggctgccacgaccaagtgacagcaatgctgtttcactggttatgcggcgtatccgaaaagaaaacgttgatgccggtgaacgtgcaaaacaggctctagcgttcgaacgcactgatttcgaccaggttcgttcactcatggaaaatagcgatcgctgccaggatatacgtaatctggcatttctggggattgcttataacaccctgttacgtatagccgaaattgccaggatcagggttaaagatatctcacgtactgacggtgggagaatgttaatccatattggcagaacgaaaacgctggttagcaccgcaggtgtagagaaggcacttagcctgggggtaactaaactggtcgagcgatggatttccgtctctggtgtagctgatgatccgaataactacctgttttgccgggtcagaaaaaatggtgttgccgcgccatctgccaccagccagctatcaactcgcgccctggaagggatttttgaagcaactcatcgattgatttacggcgctaaggatgactctggtcagagatacctggcctggtctggacacagtgcccgtgtcggagccgcgcgagatatggcccgcgctggagtttcaataccggagatcatgcaagctggtggctggaccaatgtaaatattgtcatgaactatatccgtaacctggatagtgaaacaggggcaatggtgcgcctgctggaagatggcgactaatgactcgaggacgtcccaacgatcaaggcgagttacatgatcccccatgttgtgcaaaaaagcggttagctccttcggtcctccgatcgttgtcagaagtaagttggccgcagtgttatcactcatggttatggcagcactgcataattctcttactgtcatgccatccgtaagatgcttttctgtgactggtgagtcgaattggccgcggcgttgtgacaatttaccgaacaactccgcggccgggaagccgatctcggcttgaacgaattgttaggtggcggtacttgggtcgatatcaaagtgcatcacttcttcccgtatgcccaactttgtatagagagccactgcgggatcgtcaccgtaatctgcttgcacgtagatcacataagcaccaagcgcgttggcctcatgcttgaggagattgatgagcgcggtggcaatgccctgcctccggtgctcgccggagactgcgagatcatagatatagatctcactacgcggctgctcaaacctgggcagaacgtaagccgcgagagcgccaacaaccgcttcttggtcgaaggcagcaagcgcgatgaatgtcttactacggagcaagttcccgaggtaatcggagtccggctgatgttgggagtaggtggctacgtctccgaactcacgaccgaaaagatcaagagcagcccgcatggatttgacttggtcagggccgagcctacatgtgcgaatgatgcccatacttgagccacctaactttgttttagggcgactgccctgctgcgtaacatcgttgctgctgcgtaacatcgttgctgctccataacatcaaacatcgacccacggcgtaacgcgcttgctgcttggatgcccgaggcatagactgtacaaaaaaacagtcataacaagccatgaaaaccgccactgcgccgttaccaccgctgcgttcggtcaaggttctggaccagttgcgtgagcgcatacgctacttgcattacagtttacgaaccgaacaggcttatgtcaattcgcgccgctggtgccgctggttggacgccaagggtgaatccgcctcgataccctgattactcgcttcctgcgccctctcaggcggcgataggggactggtaaaacggggattgcccagagtttaaactcactgcccgctttccagtcgggaaacctgtcgtgccagctgcattaatgaatcggccaacgcgcggggagaggcggtttgcgtattgggcgccagggtggtttttcttttcaccagtgagacgggcaacagctgattgcccttcaccgcctggccctgagagagttgcagcaagcggtccacgctggtttgccccagcaggcgaaaatcctgtttgatggtggttaacggcgggatataacatgagctgtcttcggtatcgtcgtatcccactaccgagatatccgcaccaacgcgcagcccggactcggtaatggcgcgcattgcgcccagcgccatctgatcgttggcaaccagcatcgcagtgggaacgatgccctcattcagcatttgcatggtttgttgaaaaccggacatggcactccagtcgccttcccgttccgctatcggctgaatttgattgcgagtgagatatttatgccagccagccagacgcagacgcgccgagacagaacttaatgggcccgctaacagcgcgatttgctggtgacccaatgcgaccagatgctccacgcccagtcgcgtaccgtcttcatgggagaaaataatactgttgatgggtgtctggtcagagacatcaagaaataacgccggaacattagtgcaggcagcttccacagcaatggcatcctggtcatccagcggatagttaatgatcagcccactgacgcgttgcgcgagaagattgtgcaccgccgctttacaggcttcgacgccgcttcgttctaccatcgacaccaccacgctggcacccagttgatcggcgcgagatttaatcgccgcgacaatttgcgacggcgcgtgcagggccagactggaggtggcaacgccaatcagcaacgactgtttgcccgccagttgttgtgccacgcggttgggaatgtaattcagctccgccatcgccgcttccactttttcccgcgttttcgcagaaacgtggctggcctggttcaccacgcgggaaacggtctgataagagacaccggcatactctgcgacatcgtataacgttactggtttcacattcaccaccctgaattgactctcttccgggcgctatcatgccataccgcgaaaggttttgcaccattcgatggtgtccaaataaaacgaaaggctcagtcgaaagactgggcctttcgttttatctgttgtttgtcggtgaacgctctcctgagtaggacaaatgcggccgctaatgtgaggaccaaaatcccttaacgtgagttttcgttccactgagcgtcagaccccgtagaaaagatcaaaggatcttcgaattcgcggccgcttctagaggaaatcataaaaaatttatttgctttgtgagcggataacaattataatagattcaattgtgagcggataacaattactagagaacacgtgggccgcagatctaaagaggagaaaggatctatggtgagagccctggtagtcatccgcctgtcccgcgtcaccgatgctacgacttcaccggagcgtcagctggagtcttgccagcagctctgcgcccagcgcggctgggacgtcgtcggggtagcggaggatctggacgtctccggggcggtcgatccgttcgaccggaagcgcagaccgaacctggcccggtggctagcgttcgaggagcaaccgtttgacgtgatcgtggcgtaccgggtagatcggttgacccgatcgatccggcatcttcagcagctggtccactgggccgaggaccacaagaagctggtcgtctccgcgaccgaagcgcacttcgatacgacgacgccgtttgcggcggtcgtcatcgcgcttatgggaacggtggcgcagatggaattagaagcgatcaaagagcggaaccgttcggctgcgcatttcaatatccgcgccgggaaataccgaggatccctgccgccgtggggatacctgcctacgcgcgtggacggggagtggcggctggtgccggaccctgtgcagcgagagcgcatcctcgaggtgtatcaccgcgtcgtcgacaaccacgagccgctgcatctggtggcccacgacctgaaccggcgtggtgtcctgtcgccgaaggactacttcgcgcagctgcaaggccgcgagccgcagggccgggagtggtcggctaccgcgctgaagcgatcgatgatctccggggcgatgctcgggtacgcgactctgaacggtaagaccgtccgagacgacgacggagccccgctggtgcgggctgagccgatcctgacccgtgagcagctggaggcgctgcgcgccgagctcgtcaagacctcccgggcgaagcccgcggtgtctaccccgtcgctgctgctgcgggtgttgttctgcgcggtgtgcggggagcccgcgtacaagttcgccgggggaggacgtaagcacccgcgctaccgctgccgctcgatggggttcccgaagcactgcgggaacggcacggtggcgatggccgagtgggacgcgttctgcgaggagcaggtactggatctgctcggggacgcggagcgtctggagaaagtctgggtagcgggctcggactccgcggtcgaactcgcggaggtgaacgcggagctggtggacctgacgtcgctgatcggctccccggcctaccgggcgggctctccgcagcgagaagcactggatgcccgtattgcggcgctggccgcgcggcaagaggagctggagggcctggaggctcgcccgtctggctgggagtggcgcgaaaccgggcagcggttcggggactggtggcgggagcaggacaccgcggcaaagaacacctggcttcggtcgatgaacgttcggctgacgttcgacgtccgcggcgggctgactcgcacgatcgacttcggggatcttcaggagtacgagcagcatctcaggctcggcagcgtggtcgaacggctacacaccgggatgtcggcggctaacgacgagaattatgcattggccgcctaaagttagataactctaataaggaggttatttatggacacgtacgcgggtgcttacgaccgtcagtcgcgcgagcgcgaaaattcgagcgcagcaagcccagcgacacagcgtagcgccaacgaagacaaggcggccgaccttcagcgcgaagtcgagcgcgacgggggccggttcaggttcgtcgggcatttcagcgaagcgccgggcacgtcggcgttcgggacggcggagcgcccggagttcgaacgcatcctgaacgaatgccgcgccgggcggctcaacatgatcattgtctatgacgtgtcgcgcttctcgcgcctgaaggtcatggacgcgattccgattgtctcggaattgctcgccctgggcgtgacgattgtttccactcaggaaggcgtcttccggcagggaaacgtcatggacctgattcacctgattatgcggctcgacgcgtcgcacaaagaatcttcgctgaagtcggcgaagattctcgacacgaagaaccttcagcgcgaattgggcgggtacgtcggcgggaaggcgccttacggcttcgagcttgtttcggagacgaaggagatcacgcgcaacggccgaatggtcaatgtcgtcatcaacaagcttgcgcactcgaccactccccttaccggacccttcgagttcgagcccgacgtaatccggtggtggtggcgtgagatcaagacgcacaaacaccttcccttcaagccgggcagtcaagccgccattcacccgggcagcatcacggggctttgtaagcgcatggacgctgacgccgtgccgacccggggcgagacgattgggaagaagaccgcttcaagcgcctgggacccggcaaccgttatgcgaatccttcgggacccgcgtattgcgggcttcgccgctgaggtgatctacaagaagaagccggacggcacgccgaccacgaagattgagggttaccgcattcagcgcgacccgatcacgctccggccggtcgagcttgattgcggaccgatcatcgagcccgctgagtggtatgagcttcaggcgtggttggacggcagggggcgcggcaaggggctttcccgggggcaagccattctgtccgccatggacaagctgtactgcgagtgtggcgccgtcatgacttcgaagcgcggggaagaatcgatcaaggactcttaccgctgccgtcgccggaaggtggtcgacccgtccgcacctgggcagcacgaaggcacgtgcaacgtcagcatggcggcactcgacaagttcgttgcggaacgcatcttcaacaagatcaggcacgccgaaggcgacgaagagacgttggcgcttctgtgggaagccgcccgacgcttcggcaagctcactgaggcgcctgagaagagcggcgaacgggcgaaccttgttgcggagcgcgccgacgccctgaacgcccttgaagagctgtacgaagaccgcgcggcaggcgcgtacgacggacccgttggcaggaagcacttccggaagcaacaggcagcgctgacgctccggcagcaaggggcggaagagcggcttgccgaacttgaagccgccgaagccccgaagcttccccttgaccaatggttccccgaagacgccgacgctgacccgaccggccctaagtcgtggtgggggcgcgcgtcagtagacgacaagcgcgtgttcgtcgggctcttcgtagacaagatcgttgtcacgaagtcgactacgggcagggggcagggaacgcccatcgagaagcgcgcttcgatcacgtgggcgaagccgccgaccgacgacgacgaagacgacgcccaggacggcacggaagacgtagcggcgtagctagctcactcggtcgctacgctccgggcgtgagactgcggcgggcgctgcggacacatacaaagttacccacagattccgtggataagcaggggactaacatgtgaggcaaaacagcagggccgcgccggtggcgtttttccataggctccgccctcctgccagagttcacataaacagacgcttttccggtgcatctgtgggagccgtgaggctcaaccatgaatctgacagtacgggcgaaacccgacaggacttaaagatccccaccgtttccggcgggtcgctccctcttgcgctctcctgttccgaccctgccgtttaccggatacctgttccgcctttctcccttacgggaagtgtggcgctttctcatagctcacacactggtatctcggctcggtgtaggtcgttcgctccaagctgggctgtaagcaagaactccccgttcagcccgactgctgcgccttatccggtaactgttcacttgagtccaacccggaaaagcacggtaaaacgccactggcagcagccattggtaactgggagttcgcagaggatttgtttagctaaacacgcggttgctcttgaagtgtgcgccaaagtccggctacactggaaggacagatttggttgctgtgctctgcgaaagccagttaccacggttaagcagttccccaactgacttaaccttcgatcaaaccacctccccaggtggttttttcgtttacagggcaaaagattacgcgcagaaaaaaaggatctcaagaagatcctttgatcttttctactgaaccgctctaga

SEQ ID NO: 26 - DNA, 10212 bp, synthetic construct
  source 1..10212: mol_type = other DNA
aattcgcggccgcttctagagtttacggctagctcagtcctaggtacaatgctagctactagagaaagaggagaaatactagatgagtgtgatcgctaaacaaatgacctacaaggtttatatgtcaggcacggtcaatggacactactttgaggtcgaaggcgatggaaaaggtaagccctacgagggggagcagacggtaaagctcactgtcaccaagggcggacctctgccatttgcttgggatattttatcaccacagtgtcagtacggaagcataccattcaccaagtaccctgaagacatccctgactatgtaaagcagtcattcccggagggctatacatgggagaggatcatgaactttgaagatggtgcagtgtgtactgtcagcaatgattccagcatccaaggcaactgtttcatctaccatgtcaagttctctggtttgaactttcctcccaatggacctgtcatgcagaagaagacacagggctgggaacccaacactgagcgtctctttgcacgagatggaatgctgctaggaaacaactttatggctctgaagttagaaggaggcggtcactatttgtgtgaatttaaaactacttacaaggcaaagaagcctgtgaagatgccagggtatcactatgttgaccgcaaactggatgtaaccaatcacaacaaggattacacttcggttgagcagtgtgaaatttccattgcacgcaaacctgtggtcgcctaataatactagtagcggccgctgcagtccggcaaaaaagggcaaggtgtcaccaccctgccctttttctttaaaaccgaaaagattcgggagcacgtgttgacaattaatcatcggcatagtatatcggcatagtataatacgacaaggtgaggaactaaaccatgaacatcaaaaagtttgcaaaacaagcaacagtattaacctttactaccgcactgctggcaggaggcgcaactcaagcgtttgcgaaagaaacgaaccaaaagccatataaggaaacatacggcatttcccatattacacgccatgatatgctgcaaatccctgaacagcaaaaaaatgaaaaatataaagttcctgagttcgattcgtccacaattaaaaatatctcttctgcaaaaggcctggacgtttgggacagctggccattacaaaacactgacggcactgtcgcaaactatcacggctaccacatcgtctttgcattagccggagatcctaaaaatgcggatgacacatcgatttacatgttctatcaaaaagtcggcgaaacttctattgacagctggaaaaacgctggccgcgtctttaaagacagcgacaaattcgatgcaaatgattctatcctaaaagaccaaacacaagaatggtcaggttcagccacatttacatctgacggaaaaatccgtttattctacactgatttctccggtaaacattacggcaaacaaacactgacaactgcacaagttaacgtatcagcatcagacagctctttgaacatcaacggtgtagaggattataaatcaatctttgacggtgacggaaaaacgtatcaaaatgtacagcagttcatcgatgaaggcaactacagctcaggcgacaaccatacgctgagagatcctcactacgtagaagataaaggccacaaatacttagtatttgaagcaaacactggaactgaagatggctaccaaggcgaagaatctttatttaacaaagcatactatggcaaaagcacatcattcttccgtcaagaaagtcaaaaacttctgcaaagcgataaaaaacgcacggctgagttagcaaacggcgctctcggtatgattgagctaaacgatgattacacactgaaaaaagtgatgaaaccgctgattgcatctaacacagtaacagatgaaattgaacgcgcgaacgtctttaaaatgaacggcaaatggtacctgttcactgactcccgcggatcaaaaatgacgattgacggcattacgtctaacgatatttacatgcttggttatgtttctaattctttaactggcccatacaagccgctgaacaaaactggccttgtgttaaaaatggatcttgatcctaacgatgtaacctttacttactcacacttcgctgtacctcaagcgaaaggaaacaatgtcgtgattacaagctatatgacaaacagaggattctacgcagacaaacaatcaacgtttgcgcctagcttcctgctgaacatcaaaggcaagaaaacatctgttgtcaaagacagcatccttgaacaaggacaattaacagttaacaaataaggaggacaatcatggagaaaaaaatcactggatataccaccgttgatatatcccaatggcatcgtaaagaacattttgaggcatttcagtcagttgctcaatgtacctataaccagaccgttcagctggatattacggcctttttaaagaccgtaaagaaaaataagcacaagttttatccggcctttattcacattcttgcccgcctgatgaatgctcatccggaattccgtatggcaatgaaagacggtgagctggtgatatgggatagtgttcacccttgttacaccgttttccatgagcaaactgaaacgttttcatcgctctggagtgaataccacgacgatttccggcagtttctacacatatattcgcaagatgtggcgtgttacggtgaaaacctggcctatttccctaaagggtttattgagaatatgtttttcgtctcagccaatccctgggtgagtttcaccagttttgatttaaacgtggccaatatggacaacttcttcgcccccgttttcaccgtgggcaaatattatacgcaaggcgacaaggtgctgatgccgctggcgattcaggttcatcatgccgtctgtgatggcttccatgtcggcagaatgcttaatgaattacaacagtactgcgatgagtggcagggcggggcgtaatcgcgatatcagcacacaattgcccattatacgcgcgtataatggactattgtgtgctgataggatcctcatctgttacgccggcggtagccggccagcctcgcagagcaggattcccgttgagcaccgccaggtgcgaataagggacagtgaagaaggaacacccgctcgcgggtgggcctacttcacctatcctgcccggctgacgccgttggatacaccaaggaaagtctacacgaaccctttggcaaaatcctgtatatcgtgcgaaaaaggatggatataccgaaaaaatcgctataatgaccccgaagcagggttatgcagcggaaaagcgctctttgttgatacaaccataaaatgataattacacccataaattgataattatcacacccataaattgatattgcctcttcatggtctaaacttcagtaagtttacgacattttcctcgaggtcatttccggggatccgcgatcgcttctccttacgcatctgtgcggtatttcacgagccccaacgtttacccgccaatatatcctgtcagaattcgtctcatgacagcgcttatctttaatcatattccatagtccataccatagcacatacagtagttatatgctggagaagagatccaacaaaacattcacaatggattatagaaacatttgtttattcattataatgagatgttacattcatttaatattagaaaaagccacaaattcataacacaacaagccaagaaaaaaacacaaacttaagcacacaacctttttatttgacacaccaaatatttcatcttcatcttcatatggcgcccacccttttactcttcttcttgatcagcttctgtgtcgtcaatgtcctgaagatgagaaagagcaacttttggctttttcggtttcgaagaagcttcttcttcctcaccctcgtttccatcctcagagtcctttcttttcagatccttgacatctccttcattgctacaactctctggtttcactatttccgtctttttctcattgttcaccttagctttccttgcttgctcttcacgcttgaattcggccgctgcagctttgtacaattcattcataccctcggtaataccagcagcagtcaaaaattctaacaagaccatgtgatcgcgcttctcgttggggtctttgaacagtttggactggtagctcaggtagtggttgtcgggcagcagcacggggccgtcgccgatgggggtgttctgctggtagtggtcggcgagctgcacgccgccgtcctcgatgttgtggcggatcttgaagttggccttgatgccgttcttctgcttgtcggcggtgatatagacgttgtggctgttgtagttgtactccagcttgtgccccaggatgttgccgtcctccttgaagtcgatgcccttcagctcgatgcggttcaccagggtgtcgccctcgaacttcacctcggcgcgggtcttgtagttgccgtcgtccttgaagaagatggtgcgctcctggacgtagccttcgggcatggcggacttgaagaagtcgtgctgcttcatgtggtcggggtagcgggcgaagcactgcacgccgtagcccagggtggtcacgagggtgggccagggcacgggcagcttgccggtggtgcagagcagcttcagggtcagcttgccgtaggtggcatcgccctcgccctcgccggacacgctgaacttgtggccgtttacgtcgccgtccagctcgaccaggatgggcaccaccccggtgaacagctcctcgcccttggcaggagccgcagcaggcatatgtttgtacaattcattcataccctcggtaataccagcagcagtcaaaaattctaacaagaccatgtgatcgcgcttctcgttggggtctttgaacagtttggactggtagctcaggtagtggttgtcgggcagcagcacggggccgtcgccgatgggggtgttctgctggtagtggtcggcgagctgcacgccgccgtcctcgatgttgtggcggatcttgaagttggccttgatgccgttcttctgcttgtcggcggtgatatagacgttgtggctgttgtagttgtactccagcttgtgccccaggatgttgccgtcctccttgaagtcgatgcccttcagctcgatgcggttcaccagggtgtcgccctcgaacttcacctcggcgcgggtcttgtagttgccgtcgtccttgaagaagatggtgcgctcctggacgtagccttcgggcatggcggacttgaagaagtcgtgctgcttcatgtggtcggggtagcgggcgaagcactgcacgccgtagcccagggtggtcacgagggtgggccagggcacgggcagcttgccggtggtgcagagcagcttcagggtcagcttgccgtaggtggcatcgccctcgccctcgccggacacgctgaacttgtggccgtttacgtcgccgtccagctcgaccaggatgggcaccaccccggtgaacagctcctcgcccttggctgcagccatttttttggtgaagggggcggccgctgtaattgtaaatagtaattgtaatgttgtttgttgtttgttgttgttggtaattgttgtaaaaatacgcggccgtcagagtgtcctctccaaatgaaatgaacttccttatatagaggaagggtcttgcgaaggatagtgggattgtgcgtcatcccttacgtcagtggagatatcacatcaatccacttgctttgaagacgtggttggaacgtcttctttttccacgatgctcctcgtgggtgggggtccatctttgggaccactgtcggcagaggcatcttgaacgatagcctttcctttatcgcaatgatggcatttgtaggtgccaccttccttttctactgtccttttgatgaagtgacagatagctgggcaatggaatccgaggaggtttcccgatattaccctttgttgaaaagtctcactcctgagacgaattcgttacaccacaatatatcctgccaagatctaattccggggatcggaaatccagaagcccgagaggttgcggatcgcctgaatcgccccatcatccagccagaaagtgagggagccacggttgatgagagctttgttgtaggtggaccagttggtgattttgaacttttgctttgccacggaacggtctgcgttgtcgggaagatgcgtgatctgatccttcaactcagcaaaagttcgatttattcaacaaagccacgttgtgtctcaaaatctctgatgttacattgcacaagataaaaatatatcatcatgaacaataaaactgtctgcttacataaacagtaatacaaggggtgttatgagccatattcaacgggaaacgtcttgctcaaggccgcgattaaattccaacatggatgctgatttatatgggtataaatgggctcgcgataatgtcgggcaatcaggtgcgacaatctaccgattgtatgggaagcccgatgcgccagagttgtttctgaaacatggcaaaggtagcgttgccaatgttgttacagatgagatggtcagactaaactggctgacggaatttatgcctcttccgaccatcaagcattttatccgtactcctgatgatgcatggttactcaccactgcgatcccagggaaaacagcattccaggtattagaagaatatcctgattcaggtgaaaatattgttgatgcgctggcagtgttcctgcgccggttgcattcgattcctgtttgtaattgtccttttaacagcgatcgcgtatttcgactcgctcaggcgcaatcacgaatgaataacggtttggttgatgcgagtgattttgatgacgagcgtaatggctggcctgttgaacaagtctggaaagaaatgcataaacttttgccattctcaccggattcagtcgtcactcatggtgatttctcacttgataaccttatttttgacgaggggaaattaataggttgtattgatgttggacgagtcggaatcgcagaccgataccaggatcttgccatcctatggaactgcctcggtgagttttctccttcattacagaaacggctttttcaaaaatatggtattgataatcctgatatgaataaattgcagtttcatttgatgctcgatgagtttttctaagtatgtgaccgtagagtattcttaggtggcagcgaacgaggcgcgttttttacgcgttctagagtccttactgcagtagttttgctgaaatactcgattcacaaaaatatcaacttatggttgttttgtgagatatcaatatatggttgttttgtggttaagttgctgattataaataattattaaatatcactttatggttgcatcaacaggtaccgagctctcatctgttacgctcggcgtgtagccggccagcctcgcagagcaggattcccgttgagcaccgccaggtgcgaataagggacagtgaagaaggaacacccgctcgcgggtgggcctacttcacctatcctgcccggctgatcgccgttggatacaccaaggaaagtctacacgaaccctttggcaaaatcctgtatatcgtgcgaaaaaggatggatataccgaaaaaatcgctataatgaccccgaagcagggttatgcagcggaaaagcgcttatcagcacacaattgcccattatacgcgcgtataatggactattgtgtgctgatattctccttacgcatctgtgcggtatttcattgacaggcacatttcgtaagctgtaatgcaagtagcgtaactgccgtcacgcaactggtccacaaccttgaccgaacgcagcggtggtaacggcgcagtggcggttttcatggcttcttgttatgacatgtttttttggggtacagtctatgcctcgggcatccaagcagcaagcgcgttacgccgtgggtcgatgtttgccaagcactagggacagtaagacgggtaagcctgttgatgataccgctgccttactgggtgcattagccagtctgaatgacctgtcacgggataatccgaagtggtcagactggaaaatcagagggcaggaactgctgaacagcaaaaagtcagatagcaccacatagcagacccgccataaaacgccctgagaagcccgtgacgggcttttcttgtattatgggtagtttccttgcatgaatccataaaaggcgcctgtagtgccatttacccccattcactgccagagccgtgagcgcagcgaactgaatgtcacgaaaaagacagcgactcaggtgcctgatggtcggagacaaaaggaatattcagcgatttgcccgagcttgcgagggtgctacttaagcctttagggttttaaggtctgttttgtagaggagcaaacagcgtttgcgacatccttttgtaatactgcggaactgactaaagtagtgagttatacacagggctgggatctattctttttatctttttttattctttctttattctataaattataaccacttgaatataaacaaaaaaaacacacaaaggtctagcggaatttacagagggtctagcagaatttacaagttttccagcaaaggtctagcagaatttacagatacccacaactcaaaggaaaaggactagtaattatcattgactagcccatctcaattggtatagtgattaaaatcacctagaccaattgagatgtatgtctgaattagttgttttcaaagcaaatgaactagcgattagtcgctatgacttaacggagcatgaaaccaagctaattttatgctgtgtggcactactcaaccccacgattgaaaaccctacaaggaaagaacggacggtatcgttcacttataaccaatacgctcagatgatgaacatcagtagggaaaatgcttatggtgtattagctaaagcaaccagagagctgatgacgagaactgtggaaatcaggaatcctttggttaaaggctttgagattttccagtggacaaactatgccaagttctcaagcgaaaaattagaattagtttttagtgaagagatattgccttatcttttccagttaaaaaaattcataaaatataatctggaacatgttaagtcttttgaaaacaaatactctatgaggatttatgagtggttattaaaagaactaacacaaaagaaaactcacaaggcaaatatagagattagccttgatgaatttaagttcatgttaatgcttgaaaataactaccatgagtttaaaaggcttaaccaatgggttttgaaaccaataagtaaagatttaaacacttacagcaatatgaaattggtggttgataagcgaggccgcccgactgatacgttgattttccaagttgaactagatagacaaatggatctcgtaaccgaacttgagaacaaccagataaaaatgaatggtgacaaaataccaacaaccattacatcagattcctacctacataacggactaagaaaaacactacacgatgctttaactgcaaaaattcagctcaccagttttgaggcaaaatttttgagtgacatgcaaagtaagtatgatctcaatggttcgttctcatggctcacgcaaaaacaacgaaccacactagagaacatactggctaaatacggaaggatctgaggttcttatggctcttgtatctatcagtgaagcatcaagactaacaaacaaaagtagaacaactgttcaccgttacatatcaaagggaaaactgtccatatgcacagatgaaaacggtgtaaaaaagatagatacatcagagcttttacgagtttttggtgcattcaaagctgttcaccatgaacagatcgacaatgtaacagatgaacagcatgtaacacctaatagaacaggtgaaaccagtaaaacaaagcaactagaacatgaaattgaacacctgagacaacttgttacagctcaacagtcacacatagacagcctgaaacaggcgatgctgcttatcgaatcaaagctgccgacaacacgggagccagtgacgcctcccgtggggaaaaaatcatggcaattctggaagaaatagcgctttcagccggcaaaccggctgaagccggatctgcgattctgataacaaactagcaacaccagaacagcccgtttgcgggcagcaaaacccgtaccctaggtctagggcggcgg

SEQ ID NO: 27 - DNA, 6967 bp, synthetic construct
  source 1..6967: mol_type = other DNA
gagttatacacagggctgggatctattctttttatctttttttattctttctttattctataaattataaccacttgaatataaacaaaaaaaacacacaaaggtctagcggaatttacagagggtctagcagaatttacaagttttccagcaaaggtctagcagaatttacagatacccacaactcaaaggaaaaggactagtaattatcattgactagcccatctcaattggtatagtgattaaaatcacctagaccaattgagatgtatgtctgaattagttgttttcaaagcaaatgaactagcgattagtcgctatgacttaacggagcatgaaaccaagctaattttatgctgtgtggcactactcaaccccacgattgaaaaccctacaaggaaagaacggacggtatcgttcacttataaccaatacgctcagatgatgaacatcagtagggaaaatgcttatggtgtattagctaaagcaaccagagagctgatgacgagaactgtggaaatcaggaatcctttggttaaaggctttgagattttccagtggacaaactatgccaagttctcaagcgaaaaattagaattagtttttagtgaagagatattgccttatcttttccagttaaaaaaattcataaaatataatctggaacatgttaagtcttttgaaaacaaatactctatgaggatttatgagtggttattaaaagaactaacacaaaagaaaactcacaaggcaaatatagagattagccttgatgaatttaagttcatgttaatgcttgaaaataactaccatgagtttaaaaggcttaaccaatgggttttgaaaccaataagtaaagatttaaacacttacagcaatatgaaattggtggttgataagcgaggccgcccgactgatacgttgattttccaagttgaactagatagacaaatggatctcgtaaccgaacttgagaacaaccagataaaaatgaatggtgacaaaataccaacaaccattacatcagattcctacctacataacggactaagaaaaacactacacgatgctttaactgcaaaaattcagctcaccagttttgaggcaaaatttttgagtgacatgcaaagtaagtatgatctcaatggttcgttctcatggctcacgcaaaaacaacgaaccacactagagaacatactggctaaatacggaaggatctgaggttcttatggctcttgtatctatcagtgaagcatcaagactaacaaacaaaagtagaacaactgttcaccgttacatatcaaagggaaaactgtccatatgcacagatgaaaacggtgtaaaaaagatagatacatcagagcttttacgagtttttggtgcattcaaagctgttcaccatgaacagatcgacaatgtaacagatgaacagcatgtaacacctaatagaacaggtgaaaccagtaaaacaaagcaactagaacatgaaattgaacacctgagacaacttgttacagctcaacagtcacacatagacagcctgaaacaggcgatgctgcttatcgaatcaaagctgccgacaacacgggagccagtgacgcctcccgtggggaaaaaatcatggcaattctggaagaaatagcgctttcagccggcaaaccggctgaagccggatctgcgattctgataacaaactagcaacaccagaacagcccgtttgcgggcagcaaaacccgtaccctaggtctagggcggcggaattcgcggccgcttctagagtttacggctagctcagtcctaggtacaatgctagctactagagaaagaggagaaatactagatgagtgtgatcgctaaacaaatgacctacaaggtttatatgtcaggcacggtcaatggacactactttgaggtcgaaggcgatggaaaaggtaagccctacgagggggagcagacggtaaagctcactgtcaccaagggcggacctctgccatttgcttgggatattttatcaccacagtgtcagtacggaagcataccattcaccaagtaccctgaagacatccctgactatgtaaagcagtcattcccggagggctatacatgggagaggatcatgaactttgaagatggtgcagtgtgtactgtcagcaatgattccagcatccaaggcaactgtttcatctaccatgtcaagttctctggtttgaactttcctcccaatggacctgtcatgcagaagaagacacagggctgggaacccaacactgagcgtctctttgcacgagatggaatgctgctaggaaacaactttatggctctgaagttagaaggaggcggtcactatttgtgtgaatttaaaactacttacaaggcaaagaagcctgtgaagatgccagggtatcactatgttgaccgcaaactggatgtaaccaatcacaacaaggattacacttcggttgagcagtgtgaaatttccattgcacgcaaacctgtggtcgcctaataatactagtagcggccgctgcagtccggcaaaaaagggcaaggtgtcaccaccctgccctttttctttaaaaccgaaaagatactaggagcacgtgttgacaattaatcatcggcatagtatatcggcatagtataatacgacaaggtgaggaactaaaccatgaacatcaaaaagtttgcaaaacaagcaacagtattaacctttactaccgcactgctggcaggaggcgcaactcaagcgtttgcgaaagaaacgaaccaaaagccatataaggaaacatacggcatttcccatattacacgccatgatatgctgcaaatccctgaacagcaaaaaaatgaaaaatataaagttcctgagttcgattcgtccacaattaaaaatatctcttctgcaaaaggcctggacgtttgggacagctggccattacaaaacactgacggcactgtcgcaaactatcacggctaccacatcgtctttgcattagccggagatcctaaaaatgcggatgacacatcgatttacatgttctatcaaaaagtcggcgaaacttctattgacagctggaaaaacgctggccgcgtctttaaagacagcgacaaattcgatgcaaatgattctatcctaaaagaccaaacacaagaatggtcaggttcagccacatttacatctgacggaaaaatccgtttattctacactgatttctccggtaaacattacggcaaacaaacactgacaactgcacaagttaacgtatcagcatcagacagctctttgaacatcaacggtgtagaggattataaatcaatctttgacggtgacggaaaaacgtatcaaaatgtacagcagttcatcgatgaaggcaactacagctcaggcgacaaccatacgctgagagatcctcactacgtagaagataaaggccacaaatacttagtatttgaagcaaacactggaactgaagatggctaccaaggcgaagaatctttatttaacaaagcatactatggcaaaagcacatcattcttccgtcaagaaagtcaaaaacttctgcaaagcgataaaaaacgcacggctgagttagcaaacggcgctctcggtatgattgagctaaacgatgattacacactgaaaaaagtgatgaaaccgctgattgcatctaacacagtaacagatgaaattgaacgcgcgaacgtctttaaaatgaacggcaaatggtacctgttcactgactcccgcggatcaaaaatgacgattgacggcattacgtctaacgatatttacatgcttggttatgtttctaattctttaactggcccatacaagccgctgaacaaaactggccttgtgttaaaaatggatcttgatcctaacgatgtaacctttacttactcacacttcgctgtacctcaagcgaaaggaaacaatgtcgtgattacaagctatatgacaaacagaggattctacgcagacaaacaatcaacgtttgcgcctagcttcctgctgaacatcaaaggcaagaaaacatctgttgtcaaagacagcatccttgaacaaggacaattaacagttaacaaataaggaggacaatcatggagaaaaaaatcactggatataccaccgttgatatatcccaatggcatcgtaaagaacattttgaggcatttcagtcagttgctcaatgtacctataaccagaccgttcagctggatattacggcctttttaaagaccgtaaagaaaaataagcacaagttttatccggcctttattcacattcttgcccgcctgatgaatgctcatccggaattccgtatggcaatgaaagacggtgagctggtgatatgggatagtgttcacccttgttacaccgttttccatgagcaaactgaaacgttttcatcgctctggagtgaataccacgacgatttccggcagtttctacacatatattcgcaagatgtggcgtgttacggtgaaaacctggcctatttccctaaagggtttattgagaatatgtttttcgtctcagccaatccctgggtgagtttcaccagttttgatttaaacgtggccaatatggacaacttcttcgcccccgttttcaccgtgggcaaatattatacgcaaggcgacaaggtgctgatgccgctggcgattcaggttcatcatgccgtctgtgatggcttccatgtcggcagaatgcttaatgaattacaacagtactgcgatgagtggcagggcggggcgtaatcgcgatatcagcacacaattgcccattatacgcgcgtataatggactattgtgtgctgataggatcctcatctgttacgccggcggtagccggccagcctcgcagagcaggattcccgttgagcaccgccaggtgcgaataagggacagtgaagaaggaacacccgctcgcgggtgggcctacttcacctatcctgcccggctgacgccgttggatacaccaaggaaagtctacacgaaccctttggcaaaatcctgtatatcgtgcgaaaaaggatggatataccgaaaaaatcgctataatgaccccgaagcagggttatgcagcggaaaagcgctcttgatgcaagtgtgtcgctgtcgacaggccctaggtatgaataacagtcgcgccttagcggaatgctggtacgggctgataaagaatggcatgacagagggatatatggaagctgataatgaacatatcaagttccggggatccgcgatcgcttctccttacgcatctgtgcggtatttcattgacaggcacatttcgtaagctgtaatgcaagtagcgtaactgccgtcacgcaactggtccacaaccttgaccgaacgcagcggtggtaacggcgcagtggcggttttcatggcttcttgttatgacatgtttttttggggtacagtctatgcctcgggcatccaagcagcaagcgcgttacgccgtgggtcgatgtttgatgttatggagcagcaacgatgttacgcagcagggcagtcgccctaaaacaaagttaaacatcatgagggaagcggtgatcgccgaagtatcgactcaactatcagaggtagttggcgtcatcgagcgccatctcgaaccgacgttgctggccgtacatttgtacggctccgcagtggatggcggcctgaagccacacagtgatattgatttgctggttacggtgaccgtaaggcttgatgaaacaacgcggcgagctttgatcaacgaccttttggaaacttcggcttcccctggagagagcgagattctccgcgctgtagaagtcaccattgttgtgcacgacgacatcattccgtggcgttatccagctaagcgcgaactgcaatttggagaatggcagcgcaatgacattcttgcaggtatcttcgagccagccacgtacgacattgatctggctatcttgctgacaaaagcaagagaacatagcgttgccttggtaggtccagcggcggaggaactctttgatccggttcctgaacaggatctatttgaggcgctaaatgaaaccttaacgctatggaactcgccgcccgactgggctggcgatgagcgaaatgtagtgcttacgttgtcccgcatttggtacagcgcagtaaccggcaaaatcgcgccgaaggatgtcgctgccgactgggcaatggagcgcctgccggcccagtatcagcccgtcatacttgaagctagacaggcttatcttggacaagaagaagatcgcttggcctcgcgcgcagatcagttggaagaatttgtccactacgtgaaaggcgagatcaccaaggtagtcggcaaataatgtctaacaattcgttcaagccgacggatatcgagctcgcttggactcctgttgatagatccagtaatgacctcagaactccatctggatttgttcagaacgctcggttgccgccgggcgttttttattggtgagaatccaagcactagggacagtaagacgggtaagcctgttgatgataccgctgccttactgggtgcattagccagtctgaatgacctgtcacgggataatccgaagtggtcagactggaaaatcagagggcaggaactgctgaacagcaaaaagtcagatagcaccacatagcagacccgccataaaacgccctgagaagcccgtgacgggcttttcttgtattatgggtagtttccttgcatgaatccataaaaggcgcctgtagtgccatttacccccattcactgccagagccgtgagcgcagcgaactgaatgtcacgaaaaagacagcgactcaggtgcctgatggtcggagacaaaaggaatattcagcgatttgcccgagcttgcgagggtgctacttaagcctttagggttttaaggtctgttttgtagaggagcaaacagcgtttgcgacatccttttgtaatactgcggaactgactaaagtagt

SEQ ID NO: 28 - DNA, 7918 bp, synthetic construct
  source 1..7918: mol_type = other DNA
ggtaccgagctctcatctgttacgctcggcgtgtagccggccagcctcgcagagcaggattcccgttgagcaccgccaggtgcgaataagggacagtgaagaaggaacacccgctcgcgggtgggcctacttcacctatcctgcccggctgatcgccgttggatacaccaaggaaagtctacacgaaccctttggcaaaatcctgtatatcgtgcgaaaaaggatggatataccgaaaaaatcgctataatgaccccgaagcagggttatgcagcggaaaagcgcttatcagcacacaattgcccattatacgcgcgtataatggactattgtgtgctgatattctccttacgcatctgtgcggtatttcattgacaggcacatttcgtaagctgtaatgcaagtagcgtaactgccgtcacgcaactggtccacaaccttgaccgaacgcagcggtggtaacggcgcagtggcggttttcatggcttcttgttatgacatgtttttttggggtacagtctatgcctcgggcatccaagcagcaagcgcgttacgccgtgggtcgatgtttgatgttatggagcagcaacgatgttacgcagcagggcagtcgccctaaaacaaagttaaacatcatgagggaagcggtgatcgccgaagtatcgactcaactatcagaggtagttggcgtcatcgagcgccatctcgaaccgacgttgctggccgtacatttgtacggctccgcagtggatggcggcctgaagccacacagtgatattgatttgctggttacggtgaccgtaaggcttgatgaaacaacgcggcgagctttgatcaacgaccttttggaaacttcggcttcccctggagagagcgagattctccgcgctgtagaagtcaccattgttgtgcacgacgacatcattccgtggcgttatccagctaagcgcgaactgcaatttggagaatggcagcgcaatgacattcttgcaggtatcttcgagccagccacgtacgacattgatctggctatcttgctgacaaaagcaagagaacatagcgttgccttggtaggtccagcggcggaggaactctttgatccggttcctgaacaggatctatttgaggcgctaaatgaaaccttaacgctatggaactcgccgcccgactgggctggcgatgagcgaaatgtagtgcttacgttgtcccgcatttggtacagcgcagtaaccggcaaaatcgcgccgaaggatgtcgctgccgactgggcaatggagcgcctgccggcccagtatcagcccgtcatacttgaagctagacaggcttatcttggacaagaagaagatcgcttggcctcgcgcgcagatcagttggaagaatttgtccactacgtgaaaggcgagatcaccaaggtagtcggcaaataatgtctaacaattcgttcaagccgacggatatcgagctcgcttggactcctgttgatagatccagtaatgacctcagaactccatctggatttgttcagaacgctcggttgccgccgggcgttttttattggtgagaatccaagcactagggacagtaagacgggtaagcctgttgatgataccgctgccttactgggtgcattagccagtctgaatgacctgtcacgggataatccgaagtggtcagactggaaaatcagagggcaggaactgctgaacagcaaaaagtcagatagcaccacatagcagacccgccataaaacgccctgagaagcccgtgacgggcttttcttgtattatgggtagtttccttgcatgaatccataaaaggcgcctgtagtgccatttacccccattcactgccagagccgtgagcgcagcgaactgaatgtcacgaaaaagacagcgactcaggtgcctgatggtcggagacaaaaggaatattcagcgatttgcccgagcttgcgagggtgctacttaagcctttagggttttaaggtctgttttgtagaggagcaaacagcgtttgcgacatccttttgtaatactgcggaactgactaaagtagtgagttatacacagggctgggatctattctttttatctttttttattctttctttattctataaattataaccacttgaatataaacaaaaaaaacacacaaaggtctagcggaatttacagagggtctagcagaatttacaagttttccagcaaaggtctagcagaatttacagatacccacaactcaaaggaaaaggactagtaattatcattgactagcccatctcaattggtatagtgattaaaatcacctagaccaattgagatgtatgtctgaattagttgttttcaaagcaaatgaactagcgattagtcgctatgacttaacggagcatgaaaccaagctaattttatgctgtgtggcactactcaaccccacgattgaaaaccctacaaggaaagaacggacggtatcgttcacttataaccaatacgctcagatgatgaacatcagtagggaaaatgcttatggtgtattagctaaagcaaccagagagctgatgacgagaactgtggaaatcaggaatcctttggttaaaggctttgagattttccagtggacaaactatgccaagttctcaagcgaaaaattagaattagtttttagtgaagagatattgccttatcttttccagttaaaaaaattcataaaatataatctggaacatgttaagtcttttgaaaacaaatactctatgaggatttatgagtggttattaaaagaactaacacaaaagaaaactcacaaggcaaatatagagattagccttgatgaatttaagttcatgttaatgcttgaaaataactaccatgagtttaaaaggcttaaccaatgggttttgaaaccaataagtaaagatttaaacacttacagcaatatgaaattggtggttgataagcgaggccgcccgactgatacgttgattttccaagttgaactagatagacaaatggatctcgtaaccgaacttgagaacaaccagataaaaatgaatggtgacaaaataccaacaaccattacatcagattcctacctacataacggactaagaaaaacactacacgatgctttaactgcaaaaattcagctcaccagttttgaggcaaaatttttgagtgacatgcaaagtaagtatgatctcaatggttcgttctcatggctcacgcaaaaacaacgaaccacactagagaacatactggctaaatacggaaggatctgaggttcttatggctcttgtatctatcagtgaagcatcaagactaacaaacaaaagtagaacaactgttcaccgttacatatcaaagggaaaactgtccatatgcacagatgaaaacggtgtaaaaaagatagatacatcagagcttttacgagtttttggtgcattcaaagctgttcaccatgaacagatcgacaatgtaacagatgaacagcatgtaacacctaatagaacaggtgaaaccagtaaaacaaagcaactagaacatgaaattgaacacctgagacaacttgttacagctcaacagtcacacatagacagcctgaaacaggcgatgctgcttatcgaatcaaagctgccgacaacacgggagccagtgacgcctcccgtggggaaaaaatcatggcaattctggaagaaatagcgctttcagccggcaaaccggctgaagccggatctgcgattctgataacaaactagcaacaccagaacagcccgtttgcgggcagcaaaacccgtaccctaggtctagggcggcggaattcgcggccgcttctagagtttacggctagctcagtcctaggtacaatgctagctactagagaaagaggagaaatactagatgagtgtgatcgctaaacaaatgacctacaaggtttatatgtcaggcacggtcaatggacactactttgaggtcgaaggcgatggaaaaggtaagccctacgagggggagcagacggtaaagctcactgtcaccaagggcggacctctgccatttgcttgggatattttatcaccacagtgtcagtacggaagcataccattcaccaagtaccctgaagacatccctgactatgtaaagcagtcattcccggagggctatacatgggagaggatcatgaactttgaagatggtgcagtgtgtactgtcagcaatgattccagcatccaaggcaactgtttcatctaccatgtcaagttctctggtttgaactttcctcccaatggacctgtcatgcagaagaagacacagggctgggaacccaacactgagcgtctctttgcacgagatggaatgctgctaggaaacaactttatggctctgaagttagaaggaggcggtcactatttgtgtgaatttaaaactacttacaaggcaaagaagcctgtgaagatgccagggtatcactatgttgaccgcaaactggatgtaaccaatcacaacaaggattacacttcggttgagcagtgtgaaatttccattgcacgcaaacctgtggtcgcctaataatactagtagcggccgctgcagtccggcaaaaaagggcaaggtgtcaccaccctgccctttttctttaaaaccgaaaagattcgcgagccccaactggggtaacctttgagttctctcagttgggggagcacgtgttgacaattaatcatcggcatagtatatcggcatagtataatacgacaaggtgaggaactaaaccatgtcacatctcgcagaactggttgccagtgcgaaggcggccattagccaggcgtcagatgttgccgcgttagataatgtgcgcgtcgaatatttgggtaaaaaagggcacttaacccttcagatgacgaccctgcgtgagctgccgccagaagagcgtccggcagctggtgcggttatcaacgaagcgaaagagcaggttcagcaggcgctgaatgcgcgtaaagcggaactggaaagcgctgcactgaatgcgcgtctggcggcggaaacgattgatgtctctctgccaggtcgtcgcattgaaaacggcggtctgcatccggttacccgtaccatcgaccgtatcgaaagtttcttcggtgagcttggctttaccgtggcaaccgggccggaaatcgaagacgattatcataacttcgatgctctgaacattcctggtcaccacccggcgcgcgctgaccacgacactttctggtttgacactacccgcctgctgcgtacccagacctctggcgtacagatccgcaccatgaaagcccagcagccaccgattcgtatcatcgcgcctggccgtgtttatcgtaacgactacgaccagactcacacgccgatgttccatcagatggaaggtctgattgttgataccaacatcagctttaccaacctgaaaggcacgctgcacgacttcctgcgtaacttctttgaggaagatttgcagattcgcttccgtccttcctacttcccgtttgccgaaccttctgcagaagtggacgtcatgggtaaaaacggtaaatggctggaagtgctgggctgcgggatggtgcatccgaacgtgttgcgtaacgttggcatcgacccggaagtttactctggtttcggcttcgggatggggatggagcgtctgactatgttgcgttacggcgtcaccgacctgcgttcattcttcgaaaacgatctgcgtttcctcaaacagtttaaataaggaggacaatcatgaaaaagcctgaactcaccgcgacgtctgtcgagaagtttctgatcgaaaagttcgacagcgtctccgacctgatgcagctctcggagggcgaagaatctcgtgctttcagcttcgatgtaggagggcgtggatatgtcctgcgggtaaatagctgcgccgatggtttctacaaagatcgttatgtttatcggcactttgcatcggccgcgctcccgattccggaagtgcttgacattggggaattcagcgagagcctgacctattgcatctcccgccgtgcacagggtgtcacgttgcaagacctgcctgaaaccgaactgcccgctgttctgcagccggtcgcggaggccatggatgcgatcgctgcggccgatcttagccagacgagcgggttcggcccattcggaccgcaaggaatcggtcaatacactacatggcgtgatttcatatgcgcgattgctgatccccatgtgtatcactggcaaactgtgatggacgacaccgtcagtgcgtccgtcgcgcaggctctcgatgagctgatgctttgggccgaggactgccccgaagtccggcacctcgtgcacgcggatttcggctccaacaatgtcctgacggacaatggccgcataacagcggtcattgactggagcgaggcgatgttcggggattcccaatacgaggtcgccaacatcttcttctggaggccgtggttggcttgtatggagcagcagacgcgctacttcgagcggaggcatccggagcttgcaggatcgccgcggctccgggcgtatatgctccgcattggtcttgaccaactctatcagagcttggttgacggcaatttcgatgatgcagcttgggcgcagggtcgatgcgacgcaatcgtccgatccggagccgggactgtcgggcgtacacaaatcgcccgcagaagcgcggccgtctggaccgatggctgtgtagaagtacttgccgatagtggaaaccgacgccccagcactcgtccgagggcaaaggaataacctaggctcgagtaatggtttcttagacgtcttgacagctagctcagtcctaggtataatgctagcctgtcaccggatgtgctttccggtctgatgagtccgtgaggacgaaacagcctctacaaataattttgtttaatactagagaaagaggggaaatactagatggtgtcgaaaggtgaggagcttttcacgggggtggttccaatcttagtcgagcttgatggtgacgtgaatggccataagtttagcgtgcgcggcgagggtgagggcgatgcgacgaacggtaaacttactttaaagtttatttgtactacaggcaaattaccggtcccgtggccgaccctggtcactacgcttgggtatggggtagcatgttttgcccgttaccctgaccacatgaaacagcacgatttctttaaatctgccatgcccgaagggtatgttcaggagcgcactatcagttttaaagacgacggaacgtacaaaactcgtgctgaagtaaagttcgaaggtgatacccttgtgaaccgtatcgtccttaaaggcatcgacttcaaagaggacggtaacattttaggccacaaattagagtacaacttcaattcacataaggtttatatcacagcagataagcaaaaaaatggcatcaaggcaaattttaagacccgccacaacgtagaagatggtggagtccagttggcggaccactaccagcaaaatacaccgattggcgatggtccggttttgcttcccgacaatcactatcttagccaccagagtaaactgagtaaggacccaaatgaaaagcgcgaccacatggtattgaaagagcgcgttacagcagctggaattacacacgatatggacgaactttataagtaatagggataacagggtaatcgcaaaaaaccccgcttcggcggggttttttcgcgtttaaacgtgccagggcgtgcccttgggctccccgggcgcgttttttacgcgttctagagtccataaggtaaaagtaaaccccgcggcgtatagcagaggtggcgcaccggtttatgtggtggctgaatcagcttcgacgactgagtgggctgctcaatttgcctagggcctgtcgacagcgacacacttgcatc

SEQ ID NO: 29 - DNA, 2594 bp, synthetic construct
  source 1..2594: mol_type = other DNA
atctttgacagctagctcagtcctaggtataatactagtgatgcaagtgtgtcgctgtcgacaggccctgttttagagctagaaatagcaagttaaaataaggctagtccgttatcaacttgaaaaagtggcaccgagtcggtgctttttttgaagcttgggcccgaacaaaaactcatctcagaagaggatctgaatagcgccgtcgaccatcatcatcatcatcattgagtttaaacggtctccagcttggctgttttggcggatgagagaagattttcagcctgatacagattaaatcagaacgcagaagcggtctgataaaacagaatttgcctggcggcagtagcgcggtggtcccacctgaccccatgccgaactcagaagtgaaacgccgtagcgccgatggtagtgtggggtctccccatgcgagagtagggaactgccaggcatcaaataaaacgaaaggctcagtcgaaagactgggcctttcgttttatctgttgtttgtcggtgaactggatccttactcgagtctagactgcaggcttcctcgctcactgactcgctgcgctcggtcgttcggctgcggcgagcggtatcagctcactcaaaggcggtaatacggttatccacagaatcaggggataacgcaggaaagaacatgtgagcaaaaggccagcaaaaggccaggaaccgtaaaaaggccgcgttgctggcgtttttccacaggctccgcccccctgacgagcatcacaaaaatcgacgctcaagtcagaggtggcgaaacccgacaggactataaagataccaggcgtttccccctggaagctccctcgtgcgctctcctgttccgaccctgccgcttaccggatacctgtccgcctttctcccttcgggaagcgtggcgctttctcatagctcacgctgtaggtatctcagttcggtgtaggtcgttcgctccaagctgggctgtgtgcacgaaccccccgttcagcccgaccgctgcgccttatccggtaactatcgtcttgagtccaacccggtaagacacgacttatcgccactggcagcagccactggtaacaggattagcagagcgaggtatgtaggcggtgctacagagttcttgaagtggtggcctaactacggctacactagaagaacagtatttggtatctgcgctctgctgaagccagttaccttcggaaaaagagttggtagctcttgatccggcaaacaaaccaccgctggtagcggtggtttttttgtttgcaagcagcagattacgcgcagaaaaaaaggatctcaagaagatcctttgatcttttctacggggtctgacgctcagtggaacgaaaactcacgttaagggattttggtcatgagattatcaaaaaggatcttcacctagatccttttaaattaaaaatgaagttttaaatcaatctaaagtatatatgagtaaacttggtctgacagttaccaatgcttaatcagtgaggcacctatctcagcgatctgtctatttcgttcatccatagttgcctgactccccgtcgtgtagataactacgatacgggagggcttaccatctggccccagtgctgcaatgataccgcgagacccacgctcaccggctccagatttatcagcaataaaccagccagccggaagggccgagcgcagaagtggtcctgcaactttatccgcctccatccagtctattaattgttgccgggaagctagagtaagtagttcgccagttaatagtttgcgcaacgttgttgccattgctacaggcatcgtggtgtcacgctcgtcgtttggtatggcttcattcagctccggttcccaacgatcaaggcgagttacatgatcccccatgttgtgcaaaaaagcggttagctccttcggtcctccgatcgttgtcagaagtaagttggccgcagtgttatcactcatggttatggcagcactgcataattctcttactgtcatgccatccgtaagatgcttttctgtgactggtgagtactcaaccaagtcattctgagaatagtgtatgcggcgaccgagttgctcttgcccggcgtcaatacgggataataccgcgccacatagcagaactttaaaagtgctcatcattggaaaacgttcttcggggcgaaaactctcaaggatcttaccgctgttgagatccagttcgatgtaacccactcgtgcacccaactgatcttcagcatcttttactttcaccagcgtttctgggtgagcaaaaacaggaaggcaaaatgccgcaaaaaagggaataagggcgacacggaaatgttgaatactcatactcttcctttttcaatattattgaagcatttatcagggttattgtctcatgagcggatacatatttgaatgtatttagaaaaataaacaaataggggttccgcgcacatttccccgaaaagtgccacctgacgtctaagaaaccattattatcatgacattaacctataaaaataggcgtatcacgaggcagaatttcagataaaaaaaatccttagctttcgctaaggatgatttctggaattctaaag

SEQ ID NO: 30 - DNA, 15724 bp, synthetic construct
  source 1..15724: mol_type = other DNA
aacaaatagctagctcactcggtcgctacgacattacgccatgaacaagagcgccgccgctggcctgctgggctatgcccgcgtcagcaccgacgaccaggacttgaccaaccaacgggccgaactgcacgcggccggctgcaccaagctgttttccgagaagatcaccggcaccaggcgcgaccgcccggagctggccaggatgcttgaccacctacgccctggcgacgttgtgacagtgaccaggctagaccgcctggcccgcagcacccgcgacctactggacattgccgagcgcatccaggaggccggcgcgggcctgcgtagcctggcagagccgtgggccgacaccaccacgccggccggccgcatggtgttgaccgtgttcgccggcattgccgagttcgagcgttccctaatcatcgaccgcacccggagcgggcgcgaggccgccaaggcccgaggcgtgaagtttggcccccgccctaccctcaccccggcacagatcgcgcacgcccgcgagctgatcgaccaggaaggccgcaccgtgaaagaggcggctgcactgcttggcgtgcatcgctcgaccctgtaccgcgcacttgagcgcagcgaggaagtgacgcccaccgaggccaggcggcgcggtgccttccgtgaggacgcattgaccgaggccgacgccctggcggccgccgagaatgaacgccaagaggaacaagcatgaaaccgcaccaggacggccaggacgaaccgtttttcattaccgaagagatcgaggcggagatgatcgcggccgggtacgtgttcgagccgcccgcgcacgtctcaaccgtgcggctgcatgaaatcctggccggtttgtctgatgccaagctggcggcctggccggccagcttggccgctgaagaaaccgagcgccgccgtctaaaaaggtgatgtgtatttgagtaaaacagcttgcgtcatgcggtcgctgcgtatatgatgcgatgagtaaataaacaaatacgcaaggggaacgcatgaaggttatcgctgtacttaaccagaaaggcgggtcaggcaagacgaccatcgcaacccatctagcccgcgccctgcaactcgccggggccgatgttctgttagtcgattccgatccccagggcagtgcccgcgattgggcggccgtgcgggaagatcaaccgctaaccgttgtcggcatcgaccgcccgacgattgaccgcgacgtgaaggccatcggccggcgcgacttcgtagtgatcgacggagcgccccaggcggcggacttggctgtgtccgcgatcaaggcagccgacttcgtgctgattccggtgcagccaagcccttacgacatatgggccaccgccgacctggtggagctggttaagcagcgcattgaggtcacggatggaaggctacaagcggcctttgtcgtgtcgcgggcgatcaaaggcacgcgcatcggcggtgaggttgccgaggcgctggccgggtacgagctgcccattcttgagtcccgtatcacgcagcgcgtgagctacccaggcactgccgccgccggcacaaccgttcttgaatcagaacccgagggcgacgctgcccgcgaggtccaggcgctggccgctgaaattaaatcaaaactcatttgagttaatgaggtaaagagaaaatgagcaaaagcacaaacacgctaagtgccggccgtccgagcgcacgcagcagcaaggctgcaacgttggccagcctggcagacacgccagccatgaagcgggtcaactttcagttgccggcggaggatcacaccaagctgaagatgtacgcggtacgccaaggcaagaccattaccgagctgctatctgaatacatcgcgcagctaccagagtaaatgagcaaatgaataaatgagtagatgaattttagcggctaaaggaggcggcatggaaaatcaagaacaaccaggcaccgacgccgtggaatgccccatgtgtggaggaacgggcggttggccaggcgtaagcggctgggttgtctgccggccctgcaatggcactggaacccccaagcccgaggaatcggcgtgagcggtcgcaaaccatccggcccggtacaaatcggcgcggcgctgggtgatgacctggtggagaagttgaaggccgcgcaggccgcccagcggcaacgcatcgaggcagaagcacgccccggtgaatcgtggcaagcggccgctgatcgaatccgcaaagaatcccggcaaccgccggcagccggtgcgccgtcgattaggaagccgcccaagggcgacgagcaaccagattttttcgttccgatgctctatgacgtgggcacccgcgatagtcgcagcatcatggacgtggccgttttccgtctgtcgaagcgtgaccgacgagctggcgaggtgatccgctacgagcttccagacgggcacgtagaggtttccgcagggccggccggcatggccagtgtgtgggattacgacctggtactgatggcggtttcccatctaaccgaatccatgaaccgataccgggaagggaagggagacaagcccggccgcgtgttccgtccacacgttgcggacgtactcaagttctgccggcgagccgatggcggaaagcagaaagacgacctggtagaaacctgcattcggttaaacaccacgcacgttgccatgcagcgtacgaagaaggccaagaacggccgcctggtgacggtatccgagggtgaagccttgattagccgctacaagatcgtaaagagcgaaaccgggcggccggagtacatcgagatcgagctagctgattggatgtaccgcgagatcacagaaggcaagaacccggacgtgctgacggttcaccccgattactttttgatcgatcccggcatcggccgttttctctaccgcctggcacgccgcgccgcaggcaaggcagaagccagatggttgttcaagacgatctacgaacgcagtggcagcgccggagagttcaagaagttctgtttcaccgtgcgcaagctgatcgggtcaaatgacctgccggagtacgatttgaaggaggaggcggggcaggctggcccgatcctagtcatgcgctaccgcaacctgatcgagggcgaagcatccgccggttcctaatgtacggagcagatgctagggcaaattgccctagcaggggaaaaaggtcgaaaaggtctctttcctgtggatagcacgtacattgggaacccaaagccgtacattgggaaccggaacccgtacattgggaacccaaagccgtacattgggaaccggtcacacatgtaagtgactgatataaaagagaaaaaaggcgatttttccgcctaaaactctttaaaacttattaaaactcttaaaacccgcctggcctgtgcataactgtctggccagcgcacagccgaagagctgcaaaaagcgcctacccttcggtcgctgcgctccctacgccccgccgcttcgcgtcggcctatcgcggccgctggccgctcaaaaatggctggcctacggccaggcaatctaccagggcgcggacaagccgcgccgtcgccactcgaccgccggcgcccacatcaaggcaccctgcctcgcgcgtttcggtgatgacggtgaaaacctctgacacatgcagctcccggagacggtcacagcttgtctgtaagcggatgccgggagcagacaagcccgtcagggcgcgtcagcgggtgttggcgggtgtcggggcgcagccatgacccagtcacgtagcgatagcggagtgtatactggcttaactatgcggcatcagagcagattgtactgagagtgcaccatatgcggtgtgaaataccgcacagatgcgtaaggagaaaataccgcatcaggcgctcttccgcttcctcgctcactgactcgctgcgctcggtcgttcggctgcggcgagcggtatcagctcactcaaaggcggtaatacggttatccacagaatcaggggataacgcaggaaagaacatgtgagcaaaaggccagcaaaaggccaggaaccgtaaaaaggccgcgttgctggcgtttttccataggctccgcccccctgacgagcatcacaaaaatcgacgctcaagtcagaggtggcgaaacccgacaggactataaagataccaggcgtttccccctggaagctccctcgtgcgctctcctgttccgaccctgccgcttaccggatacctgtccgcctttctcccttcgggaagcgtggcgctttctcatagctcacgctgtaggtatctcagttcggtgtaggtcgttcgctccaagctgggctgtgtgcacgaaccccccgttcagcccgaccgctgcgccttatccggtaactatcgtcttgagtccaacccggtaagacacgacttatcgccactggcagcagccactggtaacaggattagcagagcgaggtatgtaggcggtgctacagagttcttgaagtggtggcctaactacggctacactagaaggacagtatttggtatctgcgctctgctgaagccagttaccttcggaaaaagagttggtagctcttgatccggcaaacaaaccaccgctggtagcggtggtttttttgtttgcaagcagcagattacgcgcagaaaaaaaggatctcaagaagatcctttgatcttttctacggggtctgacgctcagtggaacgaaaactcacgttaagggattttggtcatgcattctaggtatcgcacgcttgtgttgacagctagctcagtcctaggtataatactagtcacgtgaactgccgagtaggtagctgataacgagacctctgtcttgtcagctagggtggtctcgtgaactgccgagtaggtagctgataactcgagagatccggctgctaacaaacccgcttaaggaagatggccaacttatttacataaggctgctgccaccgctgagcaataactagcataaccccttggggcctctaaacgggtcttgaggggttttttggtttaaacccatctaattgggaattccccctgcctcgcgcgtttcggtgatgacggtgaaaacctctgacacagcgatcgcttatgacaacttgacggctacatcattcactttttcttcacaaccggcacggaactcgctcgggctggccccggtgcattttttaaatacccgcgagaaatagagttgatcgtcaaaaccaacattgcgaccgacggtggcgataggcatccgggtggtgctcaaaagcagcttcgcctggctgatacgttggtcctcgcgccagcttaagacgctaatccctaactgctggcggaaaagatgtgacagacgcgacggcgacaagcaaacatgctgtgcgacgctggcgatatcaaaattgctgtctgccaggtgatcgctgatgtactgacaagcctcgcgtacccgattatccatcggtggatggagcgactcgttaatcgcttccatgcgccgcagtaacaattgctcaagcagatttatcgccagcagctccgaatagcgcccttccccttgcccggcgttaatgatttgcccaaacaggtcgctgaaatgcggctggtgcgcttcatccgggcgaaagaaccccgtattggcaaatattgacggccagttaagccattcatgccagtaggcgcgcggacgaaagtaaacccactggtgataccattcgcgagcctccggatgacgaccgtagtgatgaatctctcctggcgggaacagcaaaatatcacccggtcggcaaacaaattctcgtccctgatttttcaccaccccctgaccgcgaatggtgagattgagaatataacctttcattcccagcggtcggtcgataaaaaaatcgagataaccgttggcctcaatcggcgttaaacccgccaccagatgggcattaaacgagtatcccggcagcaggggatcattttgcgcttcagccatacttttcatactcccgccattcagagaagaaaccaattgtccatattgcatcagacattgccgtcactgcgtcttttactggctcttctcgctaaccaaaccggtaaccccgcttattaaaagcattctgtaacaaagcgggaccaaagccatgacaaaaacgcgtaacaaaagtgtctataatcacggcagaaaagtccacattgattatttgcacggcgtcacactttgctatgccatagcatttttatccataagattagcggatcctacctgacgctttttatcgcaactctctactgtttctccatacccgggatccgaattcgagcgaaggagatatacatatgtttttgcaaagacctaaaccttacagcgatgaaagtttagaaagtttctttatccgagtggctaacaaaaatggctacggtgatgtccatcgcttcctagaagccactaaacgattccttcaagacattgaccataatggctatcaaacctttccgactgatataactcggataaacccatactcagctaaaaacagttccagcgcacgaactgcgtcattcctgaaacttgcacaattgacatttaatgaaccgccagagctacttgggttggcaattaacagaacaaacatgaaatactcgccgtcaactagcgcggttgttagaggtgcagaagtctttcctcgcagtttactacggacgcactccatcccctgctgtcctttgtgtctgcgagaaaatggctacgcctcctacctttggcactttcaggggtacgaatactgccacagccataacgtacctttaattaccacttgtagctgtggtaaggagtttgactaccgagtatctgggttaaagggcatttgctgcaaatgcaaggagcctatcaccttaaccagcagggagaacggtcatgaggcagcgtgtactgtttcaaactggcttgctggccatgaatctaaacctctgccaaatcttcctaaaagctaccgatggggtttagttcattggtggatgggtattaaagatagcgagttcgatcacttttcgttcgttcaatttttctcaaactggccaaggtcattccactcgataatcgaagatgaagtagagttcaaccttgagcatgctgttgtcagcacgtctgaattacgactaaaagatcttcttggtcgattgtttttcggttcaattcggttacctgagcggaatcttcaacacaatatcatccttggtgagcttctctgctatttagaaaatcgtttatggcaagacaagggattaatcgccaacctcaaaatgaacgcgttagaggcgactgtaatgttaaattgtagcctcgatcagattgcatcaatggttgaacaacgcatcttgaagccaaatcgaaaaagcaagcccaacagccctcttgatgttaccgattatctatttcatttcggcgatattttctgtctttggttagctgagttccaaagcgatgagtttaaccgttcgttttatgtgtcgaggtggtaaatgcaaactctgaaagaactaatcgcatccaatcctgacgacttaacaactgaacttaagagagcatttcgtccactcacaccgcatattgcaattgatggtaatgaacttgacgcactgacgatattagtcaatttaaccgataagactgatgatcagaaagacctgctcgatcgagccaaatgcaagcaaaaacttcgagatgaaaaatggtgggctagctgcataaattgcgttaattacagacaaagccataacccaaaattcccggatatacgttctgaaggcgtgattcgaacccaagccctgggtgaattaccgagtttcctactctcgtcctcaaaaatcccaccataccattggtcatatagccatgattcaaaatacgtcaacaaaagcgcattcctcaccaatgagttttgttgggatggtgagatctcatgtttgggtgagcttcttaaagatgcagatcacccactttggaatactttgaaaaagttaggttgttctcaaaaaacttgcaaagcaatggcaaaacaactagctgatattactctcacgactatcaatgtcacactcgcaccaaattacctgactcaaatatctctccccgatagtgatacatcctacatttcactctctcctgttgcatcgctatcgatgcaaagccactttcatcagaggctccaagatgaaaatcggcatagcgcgataacgcggtttagccgaactaccaacatgggggtcactgcgatgacatgtggcggcgcatttagaatgttaaagtctggcgctaagttttccagcccccctcatcaccgattaaacagtaaacgaagttggttgacgtcagagcatgttcagtcattaaaacagtaccagcgcctcaacaaaagcctcatacctgaaaactctcggattgcactccgtagaaaatacaaaatcgagcttcaaaatatggtcagatcttggtttgcaatgcaagaccatacccttgattcgaacatacttatccaacatttgaatcatgacctatcttacttaggagccacaaaacgttttgcatacgatccagcgatgaccaagctctttactgagcttttgaaacgagagttatcaaattcaatcaataatggtgagcaacacactaatggatcgtttttagtcctaccgaatatcagggtttgtggcgcaacagctttaagctccccggtaacggtggggattccatcacttacagctttctttggcttcgttcacgcatttgaacggaatataaatcgcaccacctcatcgtttcgtgttgaatcctttgcgatatgcgtccatcaactacatgtcgagaagcgaggtttgacagcagagtttgtggaaaaaggcgacgggactatatccgctcccgcgacccgggatgactggcagtgtgatgtcgtatttagccttattttgaacaccaactttgctcaacatattgaccaagatacgttagttacatcactaccaaagcgattggctcggggttcagcaaaaattgcgattgatgactttaaacatatcaactcattctcgacattagaaacagcgatcgaatctctgccaatagaagctggtaggtggttatcactttacgcacagtcaaacaataatctaagtgatctattagcagccatgacagaggaccatcagctcatggcaagctgcgtcggttaccacttgttagaagagcccaaagataaaccaaactccctcagaggttacaaacacgctatcgccgagtgcatcattggactcattaactcaatcacctttagctcagagactgatcccaacacaatcttttggtcgctaaagaactatcaaaactacctagtggtacagccaaggagtatcaacgatgaaactaccgacaaatctagcctatgagcgctctatcgacccatcagatgtctgtttttttgtcgtctggcccgatgatagaaaaacacctttaacctacaattctcgtactctgctcgggcaaatggaagcggcatcattagcctatgatgtctcaggtcaaccaataaaaagtgccaccgctgaggcgttagctcaagggaaccctcatcaagttgatttctgccacgttccatacggtgcgagtcatattgaatgcagtttctccgtctcgttttcttctgaactacgtcaaccatataagtgtaactcaagcaaagttaaacaaacgctagtgcaattagtcgagctctacgaaacgaaaatcggctggactgagctagcaacccgatatttgatgaacatttgcaacggtaaatggctgtggaaaaatacccgtaaagcctattgctggaacattgtacttacaccttggccttggaacggggaaaaggttggatttgaagatattcgtactaactacacctcacggcaagactttaaaaataataaaaattggtctgctatagttgaaatgatcaaaaccgcattttctagtactgatgggctggcgatatttgaagtcagggccaccttgcacttgccaacgaatgctatggtgcggccaagccaagttttcacagaaaaagaaagtggcagtaaaagtaaatctaaaactcaaaacagtcgagtttttcagagtacaactattgatggtgaacgatcgccaatactaggggcctttaaaacgggagcagctattgcaaccattgacgactggtatcctgaagccactgagccactaagggtcggacggtttggggttcatcgcgaagatgtcacttgctaccgtcatccgtctaccggaaaagattttttctcgatattacaacaagcagagcactatattgaagtgttgagcgccaacaaaactcccgctcaagaaactatcaacgacatgcactttttaatggctaacctgattaagggtgggatgttccagcataaaggagactgactgtgaaatggtattataagacaatcacctttctgccagagttgtgcaacaacgagtcactggctgcaaagtgtctccgcgttctgcatggatttaactatcagtatgagacacgaaatatcggcgtttcatttccgctttggtgtgatgcaacggttggaaaaaagatttcatttgtcagcaagaacaagatagaactcgacttactacttaaacaacactatttcgtccaaatggaacaacttcaatactttcatatatccaacactgttctcgtcccagaagattgtacatacgtttcctttagacgctgtcaatctatagataagctcacagcagcagggctggcaaggaaaatcagacgcctggagaaacgtgctctatctagaggcgagcaatttgacccatcatcttttgctcaaaaagagcatactgcaatagcgcactaccactcacttggggagtccagcaaacagacgaaccgcaactttcgactcaatatcaggatgctctcggagcaaccccgtgaggggaactcgatttttagtagctatggcttatcaaattcagaaaactcgtttcagcctgtacccttaatctgacctttaataaggagatataccatggcgacaagtttacctacgccctcagcaattacgacttcggcgttagagtatgcattccatactcccgctcgcaatctaacgaaatctcgcggaaaaaacattcatcgttatgtcagtgtaaagatgagtaagaggattacggtagaatctactctagagtgtgatgcctgctatcactttgattttgagccaagtattgttcgcttttgcgctcaaccgattcgatttttatattatctcaatggtcagtctcactcctatgttcctgactttctagttcaatttgataccaacgagtttgttctatatgaagtaaagtcagcttatgctaagaacaaacctgattttgatgttgaatgggaggcgaaagtaaaagcagcaactgaactagggctagaattggagcttgttgaagagagtgatattagggatacggttgtattaaataatcttaagcgcatgcatcgttatgcttcgaaagatgagctgaataacgtacataactctctcttaaaaataataaagtacaatggcgcccaatctgcaagatgcttgggagaacagttgggtttaaaaggccgaactgttttaccaattttgtgcgatttgctgtcaaggtgtttactcgatacacgtttggataagcctctatctcttgaatctcgatttgagttggccagttatggctaagaaagggttctcaagtttccatagaaaagcagtctcttcccaagatacgcttgaatcgatagagcttgtctctagcgctaattgtctagaaagtgttacgtatcaagatatatcagcatttcccgaaacaattgcggtagagattaatttccgattaagcattcttcgctttttagcgcgaaagtgcgaaaccattgtggccaaatcaattgaaccacatcgtgtagagctacagcaaaactatagtagaaaaatacccagtgcaataacgatatatcgatggtggcttgcttttcgaaaatcagactacaaccccattagcttagcacctaatatcaaggatagaggtaatagagagacaaaagtgtcaacagttgttgattctattatggaacaggcagttgaaagagttatatctggacgaaaagtcaatgttagctctgcatataaacgtgttcgacgaaaagttcgtcaatacaatctaactcatggaacgaaatacacgtatcctaagtacgaatctgtaagaaagcgagtaaaaaagaaaaccccatttgagttattagccgcagggaaaggggagagagtagctaagagagagtttcgccgaatgggaaaaaagatcctcacgtctagcgtgctagagagggttgaaatagatcacactgtcgttgacctttttgcagtacacgaagagtatcgaatcccattgggccgaccttggcttactcaattggttgattgttacagtaaagctgtaatcggtttttatttaggtttcgagcctcctagctatgtgtcggtttcccttgcacttaagaatgcaatacaacgcaaagatgacttaatctcctcgtatgaatcgatcgagaatgaatggctatgttatggcatcccagacctactcgtaactgataatggtaaagagtttttgtcgaaagcatttgatcaagcatgtgaatcactattgatcaatgtgcatcaaaataaagttgagacgcccgacaacaaacctcatgttgaacgtaactacgggactattaatacttctctgttagacgatttacctgggaaatccttcagccagtaccttcaaagagaagggtacgactctgtgggagaagctacccttacactcaatgagattagagaaatttacttaatttggttggtggatatttatcataaaaaacccaatcagagaggcactaattgtcctaatgttgcgtggaaaaagggttgtcaagaatgggaaccagaggagttctctggttctaaagacgaattagactttaaatttgctattgttgattacaaacaacttactaaagtagggataactgtctacaaagaactgagttatagcaatgaccgtttagctgaatatagagggaagaaaggaaaccataaagttcagttcaagtataaccctgagtgtatggcagttatttgggtgttggatgaggatatgaatgagtactttacagttaatgcgattgactacgaatatgcaagtagagtatcactttggcaacataaatataacatgaaatatcaagcagaactaaattcagcagaatatgatgaggacaaggaaattgatgcagaaataaaaattgaagaaatcgcagatcgttcaattgttaagactaacaaaatcagagctcggaggcgtggcgctaggcatcaagagaatagcgcaagggctaagtcaatcagtaatgcgaacccggcctcgatacaaaaacatgaagatgaaatcgttagtgcagataatgacgattgggatattgattatgtctgagaaatcgtcaaatgagtgaaacgcgtgaggctcgtatatcaagagctaaaagggcatttgtatccacaccgagcgttaggaaaatcttgagttacatggatagatgtagagatctatcagacctagagtctgagcctacatgcatgatggtctatggtgcttcgggtgtaggtaaaacgaccgtcatcaagaaatacttaaatcaaaacagaagagagtccgaagccgggggcgatataataccggttttgcatattgagttgccagacaatgcgaagccagtagatgcagcaagggaattgctggttgaaatgggtgacccgctagcactttatgaaactgacttagctagattgacgaaaagactgactgaattaatccctgcggtcggcgtgaagctgattattatcgatgagttccaacatttggtggaagaaaggtcaaatcgggttcttacccaagtaggtaattggctaaaaatgatacttaacaaaacgaaatgtccaattgttatatttggtatgccatactcaaaagttgtactgcaagcaaactcgcaacttcacgggcgattttccattcaggttgaactgcgcccctttagctaccagggaggtagaggtgtatttaaaacttttttggaataccttgataaagccctaccttttgaaaaacaggctggcttagccaacgaaagtttgcagaaaaaattgtatgcattctctcagggaaacatgcgttcgttgagaaaccttatttatcaagcatctatcgaagcaattgataatcagcatgagacgataaccgaagaagatttcgtttttgcatcgaagttgacatcgggcgataaacccaactcatggaaaaatccttttgaggagggtgttgaggtaacagaagatatgttacgaccgccaccaaaagatattggttgggaggactatttgagacattcaaccccgagagtgagtaaaccaggtagaaataaaaactttttcgaataacctaggctgctgcgctgctgccaccgctgagcaataactagcataaccccttggggcctctaaacgggtcttgaggggttttttgctgaaacctcaggcattgaacctgcacggtaccgagctcgaattcactggccgtcgttttacaacgtcgtgactgggaaaaccctggcgttacccaacttaatcgccttgctatcgtggccggatcttgcggcccctcggcttgaacgaattgttagacattatttgccgactaccttggtgatctcgcctttcacgtagtggacaaattcttccaactgatctgcgcgcgaggccaagcgatcttcttcttgtccaagataagcctgtctagcttcaagtatgacgggctgatactgggccggcaggcgctccattgcccagtcggcagcgacatccttcggcgcgattttgccggttactgcgctgtaccaaatgcgggacaacgtaagcactacatttcgctcatcgccagcccagtcgggcggcgagttccatagcgttaaggtttcatttagcgcctcaaatagatcctgttcaggaaccggatcaaagagttcctccgccgctggacctaccaaggcaacgctatgttctcttgcttttgtcagcaagatagccagatcaatgtcgatcgtggctggctcgaagatacctgcaagaatgtcattgcgctgccattctccaaattgcagttcgcgcttagctggataacgccacggaatgatgtcgtcgtgcacaacaatggtgacttctacagcgcggagaatctcgctctctccaggggaagccgaagtttccaaaaggtcgttgatcaaagctcgccgcgttgtttcatcaagccttacggtcaccgtaaccagcaaatcaatatcactgtgtggcttcaggccgccatccactgcggagccgtacaaatgtacggccagcaacgtcggttcgagatggcgctcgatgacgccaactacctctgatagttgagtcgatacttcggcgatcaccgcttccctcatactcttcctttttcaatattattgaagcatttatcagggttattgtctcatgagcggatacatatttgaatgtatttagaaaaata

SEQ ID NO: 31 - DNA, 15724 bp, synthetic construct
  source 1..15724: mol_type = other DNA
aacaaatagctagctcactcggtcgctacgacattacgccatgaacaagagcgccgccgctggcctgctgggctatgcccgcgtcagcaccgacgaccaggacttgaccaaccaacgggccgaactgcacgcggccggctgcaccaagctgttttccgagaagatcaccggcaccaggcgcgaccgcccggagctggccaggatgcttgaccacctacgccctggcgacgttgtgacagtgaccaggctagaccgcctggcccgcagcacccgcgacctactggacattgccgagcgcatccaggaggccggcgcgggcctgcgtagcctggcagagccgtgggccgacaccaccacgccggccggccgcatggtgttgaccgtgttcgccggcattgccgagttcgagcgttccctaatcatcgaccgcacccggagcgggcgcgaggccgccaaggcccgaggcgtgaagtttggcccccgccctaccctcaccccggcacagatcgcgcacgcccgcgagctgatcgaccaggaaggccgcaccgtgaaagaggcggctgcactgcttggcgtgcatcgctcgaccctgtaccgcgcacttgagcgcagcgaggaagtgacgcccaccgaggccaggcggcgcggtgccttccgtgaggacgcattgaccgaggccgacgccctggcggccgccgagaatgaacgccaagaggaacaagcatgaaaccgcaccaggacggccaggacgaaccgtttttcattaccgaagagatcgaggcggagatgatcgcggccgggtacgtgttcgagccgcccgcgcacgtctcaaccgtgcggctgcatgaaatcctggccggtttgtctgatgccaagctggcggcctggccggccagcttggccgctgaagaaaccgagcgccgccgtctaaaaaggtgatgtgtatttgagtaaaacagcttgcgtcatgcggtcgctgcgtatatgatgcgatgagtaaataaacaaatacgcaaggggaacgcatgaaggttatcgctgtacttaaccagaaaggcgggtcaggcaagacgaccatcgcaacccatctagcccgcgccctgcaactcgccggggccgatgttctgttagtcgattccgatccccagggcagtgcccgcgattgggcggccgtgcgggaagatcaaccgctaaccgttgtcggcatcgaccgcccgacgattgaccgcgacgtgaaggccatcggccggcgcgacttcgtagtgatcgacggagcgccccaggcggcggacttggctgtgtccgcgatcaaggcagccgacttcgtgctgattccggtgcagccaagcccttacgacatatgggccaccgccgacctggtggagctggttaagcagcgcattgaggtcacggatggaaggctacaagcggcctttgtcgtgtcgcgggcgatcaaaggcacgcgcatcggcggtgaggttgccgaggcgctggccgggtacgagctgcccattcttgagtcccgtatcacgcagcgcgtgagctacccaggcactgccgccgccggcacaaccgttcttgaatcagaacccgagggcgacgctgcccgcgaggtccaggcgctggccgctgaaattaaatcaaaactcatttgagttaatgaggtaaagagaaaatgagcaaaagcacaaacacgctaagtgccggccgtccgagcgcacgcagcagcaaggctgcaacgttggccagcctggcagacacgccagccatgaagcgggtcaactttcagttgccggcggaggatcacaccaagctgaagatgtacgcggtacgccaaggcaagaccattaccgagctgctatctgaatacatcgcgcagctaccagagtaaatgagcaaatgaataaatgagtagatgaattttagcggctaaaggaggcggcatggaaaatcaagaacaaccaggcaccgacgccgtggaatgccccatgtgtggaggaacgggcggttggccaggcgtaagcggctgggttgtctgccggccctgcaatggcactggaacccccaagcccgaggaatcggcgtgagcggtcgcaaaccatccggcccggtacaaatcggcgcggcgctgggtgatgacctggtggagaagttgaaggccgcgcaggccgcccagcggcaacgcatcgaggcagaagcacgccccggtgaatcgtggcaagcggccgctgatcgaatccgcaaagaatcccggcaaccgccggcagccggtgcgccgtcgattaggaagccgcccaagggcgacgagcaaccagattttttcgttccgatgctctatgacgtgggcacccgcgatagtcgcagcatcatggacgtggccgttttccgtctgtcgaagcgtgaccgacgagctggcgaggtgatccgctacgagcttccagacgggcacgtagaggtttccgcagggccggccggcatggccagtgtgtgggattacgacctggtactgatggcggtttcccatctaaccgaatccatgaaccgataccgggaagggaagggagacaagcccggccgcgtgttccgtccacacgttgcggacgtactcaagttctgccggcgagccgatggcggaaagcagaaagacgacctggtagaaacctgcattcggttaaacaccacgcacgttgccatgcagcgtacgaagaaggccaagaacggccgcctggtgacggtatccgagggtgaagccttgattagccgctacaagatcgtaaagagcgaaaccgggcggccggagtacatcgagatcgagctagctgattggatgtaccgcgagatcacagaaggcaagaacccggacgtgctgacggttcaccccgattactttttgatcgatcccggcatcggccgttttctctaccgcctggcacgccgcgccgcaggcaaggcagaagccagatggttgttcaagacgatctacgaacgcagtggcagcgccggagagttcaagaagttctgtttcaccgtgcgcaagctgatcgggtcaaatgacctgccggagtacgatttgaaggaggaggcggggcaggctggcccgatcctagtcatgcgctaccgcaacctgatcgagggcgaagcatccgccggttcctaatgtacggagcagatgctagggcaaattgccctagcaggggaaaaaggtcgaaaaggtctctttcctgtggatagcacgtacattgggaacccaaagccgtacattgggaaccggaacccgtacattgggaacccaaagccgtacattgggaaccggtcacacatgtaagtgactgatataaaagagaaaaaaggcgatttttccgcctaaaactctttaaaacttattaaaactcttaaaacccgcctggcctgtgcataactgtctggccagcgcacagccgaagagctgcaaaaagcgcctacccttcggtcgctgcgctccctacgccccgccgcttcgcgtcggcctatcgcggccgctggccgctcaaaaatggctggcctacggccaggcaatctaccagggcgcggacaagccgcgccgtcgccactcgaccgccggcgcccacatcaaggcaccctgcctcgcgcgtttcggtgatgacggtgaaaacctctgacacatgcagctcccggagacggtcacagcttgtctgtaagcggatgccgggagcagacaagcccgtcagggcgcgtcagcgggtgttggcgggtgtcggggcgcagccatgacccagtcacgtagcgatagcggagtgtatactggcttaactatgcggcatcagagcagattgtactgagagtgcaccatatgcggtgtgaaataccgcacagatgcgtaaggagaaaataccgcatcaggcgctcttccgcttcctcgctcactgactcgctgcgctcggtcgttcggctgcggcgagcggtatcagctcactcaaaggcggtaatacggttatccacagaatcaggggataacgcaggaaagaacatgtgagcaaaaggccagcaaaaggccaggaaccgtaaaaaggccgcgttgctggcgtttttccataggctccgcccccctgacgagcatcacaaaaatcgacgctcaagtcagaggtggcgaaacccgacaggactataaagataccaggcgtttccccctggaagctccctcgtgcgctctcctgttccgaccctgccgcttaccggatacctgtccgcctttctcccttcgggaagcgtggcgctttctcatagctcacgctgtaggtatctcagttcggtgtaggtcgttcgctccaagctgggctgtgtgcacgaaccccccgttcagcccgaccgctgcgccttatccggtaactatcgtcttgagtccaacccggtaagacacgacttatcgccactggcagcagccactggtaacaggattagcagagcgaggtatgtaggcggtgctacagagttcttgaagtggtggcctaactacggctacactagaaggacagtatttggtatctgcgctctgctgaagccagttaccttcggaaaaagagttggtagctcttgatccggcaaacaaaccaccgctggtagcggtggtttttttgtttgcaagcagcagattacgcgcagaaaaaaaggatctcaagaagatcctttgatcttttctacggggtctgacgctcagtggaacgaaaactcacgttaagggattttggtcatgcattctaggtatcgcacgcttgtgttgacagctagctcagtcctaggtataatactagtcacgtgaactgccgagtaggtagctgataacatgctttacacggaaggtacaccgggcacgatgtgaactgccgagtaggtagctgataactcgagagatccggctgctaacaaacccgcttaaggaagatggccaacttatttacataaggctgctgccaccgctgagcaataactagcataaccccttggggcctctaaacgggtcttgaggggttttttggtttaaacccatctaattgggaattccccctgcctcgcgcgtttcggtgatgacggtgaaaacctctgacacagcgatcgcttatgacaacttgacggctacatcattcactttttcttcacaaccggcacggaactcgctcgggctggccccggtgcattttttaaatacccgcgagaaatagagttgatcgtcaaaaccaacattgcgaccgacggtggcgataggcatccgggtggtgctcaaaagcagcttcgcctggctgatacgttggtcctcgcgccagcttaagacgctaatccctaactgctggcggaaaagatgtgacagacgcgacggcgacaagcaaacatgctgtgcgacgctggcgatatcaaaattgctgtctgccaggtgatcgctgatgtactgacaagcctcgcgtacccgattatccatcggtggatggagcgactcgttaatcgcttccatgcgccgcagtaacaattgctcaagcagatttatcgccagcagctccgaatagcgcccttccccttgcccggcgttaatgatttgcccaaacaggtcgctgaaatgcggctggtgcgcttcatccgggcgaaagaaccccgtattggcaaatattgacggccagttaagccattcatgccagtaggcgcgcggacgaaagtaaacccactggtgataccattcgcgagcctccggatgacgaccgtagtgatgaatctctcctggcgggaacagcaaaatatcacccggtcggcaaacaaattctcgtccctgatttttcaccaccccctgaccgcgaatggtgagattgagaatataacctttcattcccagcggtcggtcgataaaaaaatcgagataaccgttggcctcaatcggcgttaaacccgccaccagatgggcattaaacgagtatcccggcagcaggggatcattttgcgcttcagccatacttttcatactcccgccattcagagaagaaaccaattgtccatattgcatcagacattgccgtcactgcgtcttttactggctcttctcgctaaccaaaccggtaaccccgcttattaaaagcattctgtaacaaagcgggaccaaagccatgacaaaaacgcgtaacaaaagtgtctataatcacggcagaaaagtccacattgattatttgcacggcgtcacactttgctatgccatagcatttttatccataagattagcggatcctacctgacgctttttatcgcaactctctactgtttctccatacccgggatccgaattcgagcgaaggagatatacatatgtttttgcaaagacctaaaccttacagcgatgaaagtttagaaagtttctttatccgagtggctaacaaaaatggctacggtgatgtccatcgcttcctagaagccactaaacgattccttcaagacattgaccataatggctatcaaacctttccgactgatataactcggataaacccatactcagctaaaaacagttccagcgcacgaactgcgtcattcctgaaacttgcacaattgacatttaatgaaccgccagagctacttgggttggcaattaacagaacaaacatgaaatactcgccgtcaactagcgcggttgttagaggtgcagaagtctttcctcgcagtttactacggacgcactccatcccctgctgtcctttgtgtctgcgagaaaatggctacgcctcctacctttggcactttcaggggtacgaatactgccacagccataacgtacctttaattaccacttgtagctgtggtaaggagtttgactaccgagtatctgggttaaagggcatttgctgcaaatgcaaggagcctatcaccttaaccagcagggagaacggtcatgaggcagcgtgtactgtttcaaactggcttgctggccatgaatctaaacctctgccaaatcttcctaaaagctaccgatggggtttagttcattggtggatgggtattaaagatagcgagttcgatcacttttcgttcgttcaatttttctcaaactggccaaggtcattccactcgataatcgaagatgaagtagagttcaaccttgagcatgctgttgtcagcacgtctgaattacgactaaaagatcttcttggtcgattgtttttcggttcaattcggttacctgagcggaatcttcaacacaatatcatccttggtgagcttctctgctatttagaaaatcgtttatggcaagacaagggattaatcgccaacctcaaaatgaacgcgttagaggcgactgtaatgttaaattgtagcctcgatcagattgcatcaatggttgaacaacgcatcttgaagccaaatcgaaaaagcaagcccaacagccctcttgatgttaccgattatctatttcatttcggcgatattttctgtctttggttagctgagttccaaagcgatgagtttaaccgttcgttttatgtgtcgaggtggtaaatgcaaactctgaaagaactaatcgcatccaatcctgacgacttaacaactgaacttaagagagcatttcgtccactcacaccgcatattgcaattgatggtaatgaacttgacgcactgacgatattagtcaatttaaccgataagactgatgatcagaaagacctgctcgatcgagccaaatgcaagcaaaaacttcgagatgaaaaatggtgggctagctgcataaattgcgttaattacagacaaagccataacccaaaattcccggatatacgttctgaaggcgtgattcgaacccaagccctgggtgaattaccgagtttcctactctcgtcctcaaaaatcccaccataccattggtcatatagccatgattcaaaatacgtcaacaaaagcgcattcctcaccaatgagttttgttgggatggtgagatctcatgtttgggtgagcttcttaaagatgcagatcacccactttggaatactttgaaaaagttaggttgttctcaaaaaacttgcaaagcaatggcaaaacaactagctgatattactctcacgactatcaatgtcacactcgcaccaaattacctgactcaaatatctctccccgatagtgatacatcctacatttcactctctcctgttgcatcgctatcgatgcaaagccactttcatcagaggctccaagatgaaaatcggcatagcgcgataacgcggtttagccgaactaccaacatgggggtcactgcgatgacatgtggcggcgcatttagaatgttaaagtctggcgctaagttttccagcccccctcatcaccgattaaacagtaaacgaagttggttgacgtcagagcatgttcagtcattaaaacagtaccagcgcctcaacaaaagcctcatacctgaaaactctcggattgcactccgtagaaaatacaaaatcgagcttcaaaatatggtcagatcttggtttgcaatgcaagaccatacccttgattcgaacatacttatccaacatttgaatcatgacctatcttacttaggagccacaaaacgttttgcatacgatccagcgatgaccaagctctttactgagcttttgaaacgagagttatcaaattcaatcaataatggtgagcaacacactaatggatcgtttttagtcctaccgaatatcagggtttgtggcgcaacagctttaagctccccggtaacggtggggattccatcacttacagctttctttggcttcgttcacgcatttgaacggaatataaatcgcaccacctcatcgtttcgtgttgaatcctttgcgatatgcgtccatcaactacatgtcgagaagcgaggtttgacagcagagtttgtggaaaaaggcgacgggactatatccgctcccgcgacccgggatgactggcagtgtgatgtcgtatttagccttattttgaacaccaactttgctcaacatattgaccaagatacgttagttacatcactaccaaagcgattggctcggggttcagcaaaaattgcgattgatgactttaaacatatcaactcattctcgacattagaaacagcgatcgaatctctgccaatagaagctggtaggtggttatcactttacgcacagtcaaacaataatctaagtgatctattagcagccatgacagaggaccatcagctcatggcaagctgcgtcggttaccacttgttagaagagcccaaagataaaccaaactccctcagaggttacaaacacgctatcgccgagtgcatcattggactcattaactcaatcacctttagctcagagactgatcccaacacaatcttttggtcgctaaagaactatcaaaactacctagtggtacagccaaggagtatcaacgatgaaactaccgacaaatctagcctatgagcgctctatcgacccatcagatgtctgtttttttgtcgtctggcccgatgatagaaaaacacctttaacctacaattctcgtactctgctcgggcaaatggaagcggcatcattagcctatgatgtctcaggtcaaccaataaaaagtgccaccgctgaggcgttagctcaagggaaccctcatcaagttgatttctgccacgttccatacggtgcgagtcatattgaatgcagtttctccgtctcgttttcttctgaactacgtcaaccatataagtgtaactcaagcaaagttaaacaaacgctagtgcaattagtcgagctctacgaaacgaaaatcggctggactgagctagcaacccgatatttgatgaacatttgcaacggtaaatggctgtggaaaaatacccgtaaagcctattgctggaacattgtacttacaccttggccttggaacggggaaaaggttggatttgaagatattcgtactaactacacctcacggcaagactttaaaaataataaaaattggtctgctatagttgaaatgatcaaaaccgcattttctagtactgatgggctggcgatatttgaagtcagggccaccttgcacttgccaacgaatgctatggtgcggccaagccaagttttcacagaaaaagaaagtggcagtaaaagtaaatctaaaactcaaaacagtcgagtttttcagagtacaactattgatggtgaacgatcgccaatactaggggcctttaaaacgggagcagctattgcaaccattgacgactggtatcctgaagccactgagccactaagggtcggacggtttggggttcatcgcgaagatgtcacttgctaccgtcatccgtctaccggaaaagattttttctcgatattacaacaagcagagcactatattgaagtgttgagcgccaacaaaactcccgctcaagaaactatcaacgacatgcactttttaatggctaacctgattaagggtgggatgttccagcataaaggagactgactgtgaaatggtattataagacaatcacctttctgccagagttgtgcaacaacgagtcactggctgcaaagtgtctccgcgttctgcatggatttaactatcagtatgagacacgaaatatcggcgtttcatttccgctttggtgtgatgcaacggttggaaaaaagatttcatttgtcagcaagaacaagatagaactcgacttactacttaaacaacactatttcgtccaaatggaacaacttcaatactttcatatatccaacactgttctcgtcccagaagattgtacatacgtttcctttagacgctgtcaatctatagataagctcacagcagcagggctggcaaggaaaatcagacgcctggagaaacgtgctctatctagaggcgagcaatttgacccatcatcttttgctcaaaaagagcatactgcaatagcgcactaccactcacttggggagtccagcaaacagacgaaccgcaactttcgactcaatatcaggatgctctcggagcaaccccgtgaggggaactcgatttttagtagctatggcttatcaaattcagaaaactcgtttcagcctgtacccttaatctgacctttaataaggagatataccatggcgacaagtttacctacgccctcagcaattacgacttcggcgttagagtatgcattccatactcccgctcgcaatctaacgaaatctcgcggaaaaaacattcatcgttatgtcagtgtaaagatgagtaagaggattacggtagaatctactctagagtgtgatgcctgctatcactttgattttgagccaagtattgttcgcttttgcgctcaaccgattcgatttttatattatctcaatggtcagtctcactcctatgttcctgactttctagttcaatttgataccaacgagtttgttctatatgaagtaaagtcagcttatgctaagaacaaacctgattttgatgttgaatgggaggcgaaagtaaaagcagcaactgaactagggctagaattggagcttgttgaagagagtgatattagggatacggttgtattaaataatcttaagcgcatgcatcgttatgcttcgaaagatgagctgaataacgtacataactctctcttaaaaataataaagtacaatggcgcccaatctgcaagatgcttgggagaacagttgggtttaaaaggccgaactgttttaccaattttgtgcgatttgctgtcaaggtgtttactcgatacacgtttggataagcctctatctcttgaatctcgatttgagttggccagttatggctaagaaagggttctcaagtttccatagaaaagcagtctcttcccaagatacgcttgaatcgatagagcttgtctctagcgctaattgtctagaaagtgttacgtatcaagatatatcagcatttcccgaaacaattgcggtagagattaatttccgattaagcattcttcgctttttagcgcgaaagtgcgaaaccattgtggccaaatcaattgaaccacatcgtgtagagctacagcaaaactatagtagaaaaatacccagtgcaataacgatatatcgatggtggcttgcttttcgaaaatcagactacaaccccattagcttagcacctaatatcaaggatagaggtaatagagagacaaaagtgtcaacagttgttgattctattatggaacaggcagttgaaagagttatatctggacgaaaagtcaatgttagctctgcatataaacgtgttcgacgaaaagttcgtcaatacaatctaactcatggaacgaaatacacgtatcctaagtacgaatctgtaagaaagcgagtaaaaaagaaaaccccatttgagttattagccgcagggaaaggggagagagtagctaagagagagtttcgccgaatgggaaaaaagatcctcacgtctagcgtgctagagagggttgaaatagatcacactgtcgttgacctttttgcagtacacgaagagtatcgaatcccattgggccgaccttggcttactcaattggttgattgttacagtaaagctgtaatcggtttttatttaggtttcgagcctcctagctatgtgtcggtttcccttgcacttaagaatgcaatacaacgcaaagatgacttaatctcctcgtatgaatcgatcgagaatgaatggctatgttatggcatcccagacctactcgtaactgataatggtaaagagtttttgtcgaaagcatttgatcaagcatgtgaatcactattgatcaatgtgcatcaaaataaagttgagacgcccgacaacaaacctcatgttgaacgtaactacgggactattaatacttctctgttagacgatttacctgggaaatccttcagccagtaccttcaaagagaagggtacgactctgtgggagaagctacccttacactcaatgagattagagaaatttacttaatttggttggtggatatttatcataaaaaacccaatcagagaggcactaattgtcctaatgttgcgtggaaaaagggttgtcaagaatgggaaccagaggagttctctggttctaaagacgaattagactttaaatttgctattgttgattacaaacaacttactaaagtagggataactgtctacaaagaactgagttatagcaatgaccgtttagctgaatatagagggaagaaaggaaaccataaagttcagttcaagtataaccctgagtgtatggcagttatttgggtgttggatgaggatatgaatgagtactttacagttaatgcgattgactacgaatatgcaagtagagtatcactttggcaacataaatataacatgaaatatcaagcagaactaaattcagcagaatatgatgaggacaaggaaattgatgcagaaataaaaattgaagaaatcgcagatcgttcaattgttaagactaacaaaatcagagctcggaggcgtggcgctaggcatcaagagaatagcgcaagggctaagtcaatcagtaatgcgaacccggcctcgatacaaaaacatgaagatgaaatcgttagtgcagataatgacgattgggatattgattatgtctgagaaatcgtcaaatgagtgaaacgcgtgaggctcgtatatcaagagctaaaagggcatttgtatccacaccgagcgttaggaaaatcttgagttacatggatagatgtagagatctatcagacctagagtctgagcctacatgcatgatggtctatggtgcttcgggtgtaggtaaaacgaccgtcatcaagaaatacttaaatcaaaacagaagagagtccgaagccgggggcgatataataccggttttgcatattgagttgccagacaatgcgaagccagtagatgcagcaagggaattgctggttgaaatgggtgacccgctagcactttatgaaactgacttagctagattgacgaaaagactgactgaattaatccctgcggtcggcgtgaagctgattattatcgatgagttccaacatttggtggaagaaaggtcaaatcgggttcttacccaagtaggtaattggctaaaaatgatacttaacaaaacgaaatgtccaattgttatatttggtatgccatactcaaaagttgtactgcaagcaaactcgcaacttcacgggcgattttccattcaggttgaactgcgcccctttagctaccagggaggtagaggtgtatttaaaacttttttggaataccttgataaagccctaccttttgaaaaacaggctggcttagccaacgaaagtttgcagaaaaaattgtatgcattctctcagggaaacatgcgttcgttgagaaaccttatttatcaagcatctatcgaagcaattgataatcagcatgagacgataaccgaagaagatttcgtttttgcatcgaagttgacatcgggcgataaacccaactcatggaaaaatccttttgaggagggtgttgaggtaacagaagatatgttacgaccgccaccaaaagatattggttgggaggactatttgagacattcaaccccgagagtgagtaaaccaggtagaaataaaaactttttcgaataacctaggctgctgcgctgctgccaccgctgagcaataactagcataaccccttggggcctctaaacgggtcttgaggggttttttgctgaaacctcaggcattgaacctgcacggtaccgagctcgaattcactggccgtcgttttacaacgtcgtgactgggaaaaccctggcgttacccaacttaatcgccttgctatcgtggccggatcttgcggcccctcggcttgaacgaattgttagacattatttgccgactaccttggtgatctcgcctttcacgtagtggacaaattcttccaactgatctgcgcgcgaggccaagcgatcttcttcttgtccaagataagcctgtctagcttcaagtatgacgggctgatactgggccggcaggcgctccattgcccagtcggcagcgacatccttcggcgcgattttgccggttactgcgctgtaccaaatgcgggacaacgtaagcactacatttcgctcatcgccagcccagtcgggcggcgagttccatagcgttaaggtttcatttagcgcctcaaatagatcctgttcaggaaccggatcaaagagttcctccgccgctggacctaccaaggcaacgctatgttctcttgcttttgtcagcaagatagccagatcaatgtcgatcgtggctggctcgaagatacctgcaagaatgtcattgcgctgccattctccaaattgcagttcgcgcttagctggataacgccacggaatgatgtcgtcgtgcacaacaatggtgacttctacagcgcggagaatctcgctctctccaggggaagccgaagtttccaaaaggtcgttgatcaaagctcgccgcgttgtttcatcaagccttacggtcaccgtaaccagcaaatcaatatcactgtgtggcttcaggccgccatccactgcggagccgtacaaatgtacggccagcaacgtcggttcgagatggcgctcgatgacgccaactacctctgatagttgagtcgatacttcggcgatcaccgcttccctcatactcttcctttttcaatattattgaagcatttatcagggttattgtctcatgagcggatacatatttgaatgtatttagaaaaata

SEQ ID NO: 32 - DNA, 15724 bp, synthetic construct
  source 1..15724: mol_type = other DNA
aacaaatagctagctcactcggtcgctacgacattacgccatgaacaagagcgccgccgctggcctgctgggctatgcccgcgtcagcaccgacgaccaggacttgaccaaccaacgggccgaactgcacgcggccggctgcaccaagctgttttccgagaagatcaccggcaccaggcgcgaccgcccggagctggccaggatgcttgaccacctacgccctggcgacgttgtgacagtgaccaggctagaccgcctggcccgcagcacccgcgacctactggacattgccgagcgcatccaggaggccggcgcgggcctgcgtagcctggcagagccgtgggccgacaccaccacgccggccggccgcatggtgttgaccgtgttcgccggcattgccgagttcgagcgttccctaatcatcgaccgcacccggagcgggcgcgaggccgccaaggcccgaggcgtgaagtttggcccccgccctaccctcaccccggcacagatcgcgcacgcccgcgagctgatcgaccaggaaggccgcaccgtgaaagaggcggctgcactgcttggcgtgcatcgctcgaccctgtaccgcgcacttgagcgcagcgaggaagtgacgcccaccgaggccaggcggcgcggtgccttccgtgaggacgcattgaccgaggccgacgccctggcggccgccgagaatgaacgccaagaggaacaagcatgaaaccgcaccaggacggccaggacgaaccgtttttcattaccgaagagatcgaggcggagatgatcgcggccgggtacgtgttcgagccgcccgcgcacgtctcaaccgtgcggctgcatgaaatcctggccggtttgtctgatgccaagctggcggcctggccggccagcttggccgctgaagaaaccgagcgccgccgtctaaaaaggtgatgtgtatttgagtaaaacagcttgcgtcatgcggtcgctgcgtatatgatgcgatgagtaaataaacaaatacgcaaggggaacgcatgaaggttatcgctgtacttaaccagaaaggcgggtcaggcaagacgaccatcgcaacccatctagcccgcgccctgcaactcgccggggccgatgttctgttagtcgattccgatccccagggcagtgcccgcgattgggcggccgtgcgggaagatcaaccgctaaccgttgtcggcatcgaccgcccgacgattgaccgcgacgtgaaggccatcggccggcgcgacttcgtagtgatcgacggagcgccccaggcggcggacttggctgtgtccgcgatcaaggcagccgacttcgtgctgattccggtgcagccaagcccttacgacatatgggccaccgccgacctggtggagctggttaagcagcgcattgaggtcacggatggaaggctacaagcggcctttgtcgtgtcgcgggcgatcaaaggcacgcgcatcggcggtgaggttgccgaggcgctggccgggtacgagctgcccattcttgagtcccgtatcacgcagcgcgtgagctacccaggcactgccgccgccggcacaaccgttcttgaatcagaacccgagggcgacgctgcccgcgaggtccaggcgctggccgctgaaattaaatcaaaactcatttgagttaatgaggtaaagagaaaatgagcaaaagcacaaacacgctaagtgccggccgtccgagcgcacgcagcagcaaggctgcaacgttggccagcctggcagacacgccagccatgaagcgggtcaactttcagttgccggcggaggatcacaccaagctgaagatgtacgcggtacgccaaggcaagaccattaccgagctgctatctgaatacatcgcgcagctaccagagtaaatgagcaaatgaataaatgagtagatgaattttagcggctaaaggaggcggcatggaaaatcaagaacaaccaggcaccgacgccgtggaatgccccatgtgtggaggaacgggcggttggccaggcgtaagcggctgggttgtctgccggccctgcaatggcactggaacccccaagcccgaggaatcggcgtgagcggtcgcaaaccatccggcccggtacaaatcggcgcggcgctgggtgatgacctggtggagaagttgaaggccgcgcaggccgcccagcggcaacgcatcgaggcagaagcacgccccggtgaatcgtggcaagcggccgctgatcgaatccgcaaagaatcccggcaaccgccggcagccggtgcgccgtcgattaggaagccgcccaagggcgacgagcaaccagattttttcgttccgatgctctatgacgtgggcacccgcgatagtcgcagcatcatggacgtggccgttttccgtctgtcgaagcgtgaccgacgagctggcgaggtgatccgctacgagcttccagacgggcacgtagaggtttccgcagggccggccggcatggccagtgtgtgggattacgacctggtactgatggcggtttcccatctaaccgaatccatgaaccgataccgggaagggaagggagacaagcccggccgcgtgttccgtccacacgttgcggacgtactcaagttctgccggcgagccgatggcggaaagcagaaagacgacctggtagaaacctgcattcggttaaacaccacgcacgttgccatgcagcgtacgaagaaggccaagaacggccgcctggtgacggtatccgagggtgaagccttgattagccgctacaagatcgtaaagagcgaaaccgggcggccggagtacatcgagatcgagctagctgattggatgtaccgcgagatcacagaaggcaagaacccggacgtgctgacggttcaccccgattactttttgatcgatcccggcatcggccgttttctctaccgcctggcacgccgcgccgcaggcaaggcagaagccagatggttgttcaagacgatctacgaacgcagtggcagcgccggagagttcaagaagttctgtttcaccgtgcgcaagctgatcgggtcaaatgacctgccggagtacgatttgaaggaggaggcggggcaggctggcccgatcctagtcatgcgctaccgcaacctgatcgagggcgaagcatccgccggttcctaatgtacggagcagatgctagggcaaattgccctagcaggggaaaaaggtcgaaaaggtctctttcctgtggatagcacgtacattgggaacccaaagccgtacattgggaaccggaacccgtacattgggaacccaaagccgtacattgggaaccggtcacacatgtaagtgactgatataaaagagaaaaaaggcgatttttccgcctaaaactctttaaaacttattaaaactcttaaaacccgcctggcctgtgcataactgtctggccagcgcacagccgaagagctgcaaaaagcgcctacccttcggtcgctgcgctccctacgccccgccgcttcgcgtcggcctatcgcggccgctggccgctcaaaaatggctggcctacggccaggcaatctaccagggcgcggacaagccgcgccgtcgccactcgaccgccggcgcccacatcaaggcaccctgcctcgcgcgtttcggtgatgacggtgaaaacctctgacacatgcagctcccggagacggtcacagcttgtctgtaagcggatgccgggagcagacaagcccgtcagggcgcgtcagcgggtgttggcgggtgtcggggcgcagccatgacccagtcacgtagcgatagcggagtgtatactggcttaactatgcggcatcagagcagattgtactgagagtgcaccatatgcggtgtgaaataccgcacagatgcgtaaggagaaaataccgcatcaggcgctcttccgcttcctcgctcactgactcgctgcgctcggtcgttcggctgcggcgagcggtatcagctcactcaaaggcggtaatacggttatccacagaatcaggggataacgcaggaaagaacatgtgagcaaaaggccagcaaaaggccaggaaccgtaaaaaggccgcgttgctggcgtttttccataggctccgcccccctgacgagcatcacaaaaatcgacgctcaagtcagaggtggcgaaacccgacaggactataaagataccaggcgtttccccctggaagctccctcgtgcgctctcctgttccgaccctgccgcttaccggatacctgtccgcctttctcccttcgggaagcgtggcgctttctcatagctcacgctgtaggtatctcagttcggtgtaggtcgttcgctccaagctgggctgtgtgcacgaaccccccgttcagcccgaccgctgcgccttatccggtaactatcgtcttgagtccaacccggtaagacacgacttatcgccactggcagcagccactggtaacaggattagcagagcgaggtatgtaggcggtgctacagagttcttgaagtggtggcctaactacggctacactagaaggacagtatttggtatctgcgctctgctgaagccagttaccttcggaaaaagagttggtagctcttgatccggcaaacaaaccaccgctggtagcggtggtttttttgtttgcaagcagcagattacgcgcagaaaaaaaggatctcaagaagatcctttgatcttttctacggggtctgacgctcagtggaacgaaaactcacgttaagggattttggtcatgcattctaggtatcgcacgcttgtgttgacagctagctcagtcctaggtataatactagtcacgtgaactgccgagtaggtagctgataacgttgcgagcggcattatcgcgatgcgggtttcgtgaactgccgagtaggtagctgataactcgagagatccggctgctaacaaacccgcttaaggaagatggccaacttatttacataaggctgctgccaccgctgagcaataactagcataaccccttggggcctctaaacgggtcttgaggggttttttggtttaaacccatctaattgggaattccccctgcctcgcgcgtttcggtgatgacggtgaaaacctctgacacagcgatcgcttatgacaacttgacggctacatcattcactttttcttcacaaccggcacggaactcgctcgggctggccccggtgcattttttaaatacccgcgagaaatagagttgatcgtcaaaaccaacattgcgaccgacggtggcgataggcatccgggtggtgctcaaaagcagcttcgcctggctgatacgttggtcctcgcgccagcttaagacgctaatccctaactgctggcggaaaagatgtgacagacgcgacggcgacaagcaaacatgctgtgcgacgctggcgatatcaaaattgctgtctgccaggtgatcgctgatgtactgacaagcctcgcgtacccgattatccatcggtggatggagcgactcgttaatcgcttccatgcgccgcagtaacaattgctcaagcagatttatcgccagcagctccgaatagcgcccttccccttgcccggcgttaatgatttgcccaaacaggtcgctgaaatgcggctggtgcgcttcatccgggcgaaagaaccccgtattggcaaatattgacggccagttaagccattcatgccagtaggcgcgcggacgaaagtaaacccactggtgataccattcgcgagcctccggatgacgaccgtagtgatgaatctctcctggcgggaacagcaaaatatcacccggtcggcaaacaaattctcgtccctgatttttcaccaccccctgaccgcgaatggtgagattgagaatataacctttcattcccagcggtcggtcgataaaaaaatcgagataaccgttggcctcaatcggcgttaaacccgccaccagatgggcattaaacgagtatcccggcagcaggggatcattttgcgcttcagccatacttttcatactcccgccattcagagaagaaaccaattgtccatattgcatcagacattgccgtcactgcgtcttttactggctcttctcgctaaccaaaccggtaaccccgcttattaaaagcattctgtaacaaagcgggaccaaagccatgacaaaaacgcgtaacaaaagtgtctataatcacggcagaaaagtccacattgattatttgcacggcgtcacactttgctatgccatagcatttttatccataagattagcggatcctacctgacgctttttatcgcaactctctactgtttctccatacccgggatccgaattcgagcgaaggagatatacatatgtttttgcaaagacctaaaccttacagcgatgaaagtttagaaagtttctttatccgagtggctaacaaaaatggctacggtgatgtccatcgcttcctagaagccactaaacgattccttcaagacattgaccataatggctatcaaacctttccgactgatataactcggataaacccatactcagctaaaaacagttccagcgcacgaactgcgtcattcctgaaacttgcacaattgacatttaatgaaccgccagagctacttgggttggcaattaacagaacaaacatgaaatactcgccgtcaactagcgcggttgttagaggtgcagaagtctttcctcgcagtttactacggacgcactccatcccctgctgtcctttgtgtctgcgagaaaatggctacgcctcctacctttggcactttcaggggtacgaatactgccacagccataacgtacctttaattaccacttgtagctgtggtaaggagtttgactaccgagtatctgggttaaagggcatttgctgcaaatgcaaggagcctatcaccttaaccagcagggagaacggtcatgaggcagcgtgtactgtttcaaactggcttgctggccatgaatctaaacctctgccaaatcttcctaaaagctaccgatggggtttagttcattggtggatgggtattaaagatagcgagttcgatcacttttcgttcgttcaatttttctcaaactggccaaggtcattccactcgataatcgaagatgaagtagagttcaaccttgagcatgctgttgtcagcacgtctgaattacgactaaaagatcttcttggtcgattgtttttcggttcaattcggttacctgagcggaatcttcaacacaatatcatccttggtgagcttctctgctatttagaaaatcgtttatggcaagacaagggattaatcgccaacctcaaaatgaacgcgttagaggcgactgtaatgttaaattgtagcctcgatcagattgcatcaatggttgaacaacgcatcttgaagccaaatcgaaaaagcaagcccaacagccctcttgatgttaccgattatctatttcatttcggcgatattttctgtctttggttagctgagttccaaagcgatgagtttaaccgttcgttttatgtgtcgaggtggtaaatgcaaactctgaaagaactaatcgcatccaatcctgacgacttaacaactgaacttaagagagcatttcgtccactcacaccgcatattgcaattgatggtaatgaacttgacgcactgacgatattagtcaatttaaccgataagactgatgatcagaaagacctgctcgatcgagccaaatgcaagcaaaaacttcgagatgaaaaatggtgggctagctgcataaattgcgttaattacagacaaagccataacccaaaattcccggatatacgttctgaaggcgtgattcgaacccaagccctgggtgaattaccgagtttcctactctcgtcctcaaaaatcccaccataccattggtcatatagccatgattcaaaatacgtcaacaaaagcgcattcctcaccaatgagttttgttgggatggtgagatctcatgtttgggtgagcttcttaaagatgcagatcacccactttggaatactttgaaaaagttaggttgttctcaaaaaacttgcaaagcaatggcaaaacaactagctgatattactctcacgactatcaatgtcacactcgcaccaaattacctgactcaaatatctctccccgatagtgatacatcctacatttcactctctcctgttgcatcgctatcgatgcaaagccactttcatcagaggctccaagatgaaaatcggcatagcgcgataacgcggtttagccgaactaccaacatgggggtcactgcgatgacatgtggcggcgcatttagaatgttaaagtctggcgctaagttttccagcccccctcatcaccgattaaacagtaaacgaagttggttgacgtcagagcatgttcagtcattaaaacagtaccagcgcctcaacaaaagcctcatacctgaaaactctcggattgcactccgtagaaaatacaaaatcgagcttcaaaatatggtcagatcttggtttgcaatgcaagaccatacccttgattcgaacatacttatccaacatttgaatcatgacctatcttacttaggagccacaaaacgttttgcatacgatccagcgatgaccaagctctttactgagcttttgaaacgagagttatcaaattcaatcaataatggtgagcaacacactaatggatcgtttttagtcctaccgaatatcagggtttgtggcgcaacagctttaagctccccggtaacggtggggattccatcacttacagctttctttggcttcgttcacgcatttgaacggaatataaatcgcaccacctcatcgtttcgtgttgaatcctttgcgatatgcgtccatcaactacatgtcgagaagcgaggtttgacagcagagtttgtggaaaaaggcgacgggactatatccgctcccgcgacccgggatgactggcagtgtgatgtcgtatttagccttattttgaacaccaactttgctcaacatattgaccaagatacgttagttacatcactaccaaagcgattggctcggggttcagcaaaaattgcgattgatgactttaaacatatcaactcattctcgacattagaaacagcgatcgaatctctgccaatagaagctggtaggtggttatcactttacgcacagtcaaacaataatctaagtgatctattagcagccatgacagaggaccatcagctcatggcaagctgcgtcggttaccacttgttagaagagcccaaagataaaccaaactccctcagaggttacaaacacgctatcgccgagtgcatcattggactcattaactcaatcacctttagctcagagactgatcccaacacaatcttttggtcgctaaagaactatcaaaactacctagtggtacagccaaggagtatcaacgatgaaactaccgacaaatctagcctatgagcgctctatcgacccatcagatgtctgtttttttgtcgtctggcccgatgatagaaaaacacctttaacctacaattctcgtactctgctcgggcaaatggaagcggcatcattagcctatgatgtctcaggtcaaccaataaaaagtgccaccgctgaggcgttagctcaagggaaccctcatcaagttgatttctgccacgttccatacggtgcgagtcatattgaatgcagtttctccgtctcgttttcttctgaactacgtcaaccatataagtgtaactcaagcaaagttaaacaaacgctagtgcaattagtcgagctctacgaaacgaaaatcggctggactgagctagcaacccgatatttgatgaacatttgcaacggtaaatggctgtggaaaaatacccgtaaagcctattgctggaacattgtacttacaccttggccttggaacggggaaaaggttggatttgaagatattcgtactaactacacctcacggcaagactttaaaaataataaaaattggtctgctatagttgaaatgatcaaaaccgcattttctagtactgatgggctggcgatatttgaagtcagggccaccttgcacttgccaacgaatgctatggtgcggccaagccaagttttcacagaaaaagaaagtggcagtaaaagtaaatctaaaactcaaaacagtcgagtttttcagagtacaactattgatggtgaacgatcgccaatactaggggcctttaaaacgggagcagctattgcaaccattgacgactggtatcctgaagccactgagccactaagggtcggacggtttggggttcatcgcgaagatgtcacttgctaccgtcatccgtctaccggaaaagattttttctcgatattacaacaagcagagcactatattgaagtgttgagcgccaacaaaactcccgctcaagaaactatcaacgacatgcactttttaatggctaacctgattaagggtgggatgttccagcataaaggagactgactgtgaaatggtattataagacaatcacctttctgccagagttgtgcaacaacgagtcactggctgcaaagtgtctccgcgttctgcatggatttaactatcagtatgagacacgaaatatcggcgtttcatttccgctttggtgtgatgcaacggttggaaaaaagatttcatttgtcagcaagaacaagatagaactcgacttactacttaaacaacactatttcgtccaaatggaacaacttcaatactttcatatatccaacactgttctcgtcccagaagattgtacatacgtttcctttagacgctgtcaatctatagataagctcacagcagcagggctggcaaggaaaatcagacgcctggagaaacgtgctctatctagaggcgagcaatttgacccatcatcttttgctcaaaaagagcatactgcaatagcgcactaccactcacttggggagtccagcaaacagacgaaccgcaactttcgactcaatatcaggatgctctcggagcaaccccgtgaggggaactcgatttttagtagctatggcttatcaaattcagaaaactcgtttcagcctgtacccttaatctgacctttaataaggagatataccatggcgacaagtttacctacgccctcagcaattacgacttcggcgttagagtatgcattccatactcccgctcgcaatctaacgaaatctcgcggaaaaaacattcatcgttatgtcagtgtaaagatgagtaagaggattacggtagaatctactctagagtgtgatgcctgctatcactttgattttgagccaagtattgttcgcttttgcgctcaaccgattcgatttttatattatctcaatggtcagtctcactcctatgttcctgactttctagttcaatttgataccaacgagtttgttctatatgaagtaaagtcagcttatgctaagaacaaacctgattttgatgttgaatgggaggcgaaagtaaaagcagcaactgaactagggctagaattggagcttgttgaagagagtgatattagggatacggttgtattaaataatcttaagcgcatgcatcgttatgcttcgaaagatgagctgaataacgtacataactctctcttaaaaataataaagtacaatggcgcccaatctgcaagatgcttgggagaacagttgggtttaaaaggccgaactgttttaccaattttgtgcgatttgctgtcaaggtgtttactcgatacacgtttggataagcctctatctcttgaatctcgatttgagttggccagttatggctaagaaagggttctcaagtttccatagaaaagcagtctcttcccaagatacgcttgaatcgatagagcttgtctctagcgctaattgtctagaaagtgttacgtatcaagatatatcagcatttcccgaaacaattgcggtagagattaatttccgattaagcattcttcgctttttagcgcgaaagtgcgaaaccattgtggccaaatcaattgaaccacatcgtgtagagctacagcaaaactatagtagaaaaatacccagtgcaataacgatatatcgatggtggcttgcttttcgaaaatcagactacaaccccattagcttagcacctaatatcaaggatagaggtaatagagagacaaaagtgtcaacagttgttgattctattatggaacaggcagttgaaagagttatatctggacgaaaagtcaatgttagctctgcatataaacgtgttcgacgaaaagttcgtcaatacaatctaactcatggaacgaaatacacgtatcctaagtacgaatctgtaagaaagcgagtaaaaaagaaaaccccatttgagttattagccgcagggaaaggggagagagtagctaagagagagtttcgccgaatgggaaaaaagatcctcacgtctagcgtgctagagagggttgaaatagatcacactgtcgttgacctttttgcagtacacgaagagtatcgaatcccattgggccgaccttggcttactcaattggttgattgttacagtaaagctgtaatcggtttttatttaggtttcgagcctcctagctatgtgtcggtttcccttgcacttaagaatgcaatacaacgcaaagatgacttaatctcctcgtatgaatcgatcgagaatgaatggctatgttatggcatcccagacctactcgtaactgataatggtaaagagtttttgtcgaaagcatttgatcaagcatgtgaatcactattgatcaatgtgcatcaaaataaagttgagacgcccgacaacaaacctcatgttgaacgtaactacgggactattaatacttctctgttagacgatttacctgggaaatccttcagccagtaccttcaaagagaagggtacgactctgtgggagaagctacccttacactcaatgagattagagaaatttacttaatttggttggtggatatttatcataaaaaacccaatcagagaggcactaattgtcctaatgttgcgtggaaaaagggttgtcaagaatgggaaccagaggagttctctggttctaaagacgaattagactttaaatttgctattgttgattacaaacaacttactaaagtagggataactgtctacaaagaactgagttatagcaatgaccgtttagctgaatatagagggaagaaaggaaaccataaagttcagttcaagtataaccctgagtgtatggcagttatttgggtgttggatgaggatatgaatgagtactttacagttaatgcgattgactacgaatatgcaagtagagtatcactttggcaacataaatataacatgaaatatcaagcagaactaaattcagcagaatatgatgaggacaaggaaattgatgcagaaataaaaattgaagaaatcgcagatcgttcaattgttaagactaacaaaatcagagctcggaggcgtggcgctaggcatcaagagaatagcgcaagggctaagtcaatcagtaatgcgaacccggcctcgatacaaaaacatgaagatgaaatcgttagtgcagataatgacgattgggatattgattatgtctgagaaatcgtcaaatgagtgaaacgcgtgaggctcgtatatcaagagctaaaagggcatttgtatccacaccgagcgttaggaaaatcttgagttacatggatagatgtagagatctatcagacctagagtctgagcctacatgcatgatggtctatggtgcttcgggtgtaggtaaaacgaccgtcatcaagaaatacttaaatcaaaacagaagagagtccgaagccgggggcgatataataccggttttgcatattgagttgccagacaatgcgaagccagtagatgcagcaagggaattgctggttgaaatgggtgacccgctagcactttatgaaactgacttagctagattgacgaaaagactgactgaattaatccctgcggtcggcgtgaagctgattattatcgatgagttccaacatttggtggaagaaaggtcaaatcgggttcttacccaagtaggtaattggctaaaaatgatacttaacaaaacgaaatgtccaattgttatatttggtatgccatactcaaaagttgtactgcaagcaaactcgcaacttcacgggcgattttccattcaggttgaactgcgcccctttagctaccagggaggtagaggtgtatttaaaacttttttggaataccttgataaagccctaccttttgaaaaacaggctggcttagccaacgaaagtttgcagaaaaaattgtatgcattctctcagggaaacatgcgttcgttgagaaaccttatttatcaagcatctatcgaagcaattgataatcagcatgagacgataaccgaagaagatttcgtttttgcatcgaagttgacatcgggcgataaacccaactcatggaaaaatccttttgaggagggtgttgaggtaacagaagatatgttacgaccgccaccaaaagatattggttgggaggactatttgagacattcaaccccgagagtgagtaaaccaggtagaaataaaaactttttcgaataacctaggctgctgcgctgctgccaccgctgagcaataactagcataaccccttggggcctctaaacgggtcttgaggggttttttgctgaaacctcaggcattgaacctgcacggtaccgagctcgaattcactggccgtcgttttacaacgtcgtgactgggaaaaccctggcgttacccaacttaatcgccttgctatcgtggccggatcttgcggcccctcggcttgaacgaattgttagacattatttgccgactaccttggtgatctcgcctttcacgtagtggacaaattcttccaactgatctgcgcgcgaggccaagcgatcttcttcttgtccaagataagcctgtctagcttcaagtatgacgggctgatactgggccggcaggcgctccattgcccagtcggcagcgacatccttcggcgcgattttgccggttactgcgctgtaccaaatgcgggacaacgtaagcactacatttcgctcatcgccagcccagtcgggcggcgagttccatagcgttaaggtttcatttagcgcctcaaatagatcctgttcaggaaccggatcaaagagttcctccgccgctggacctaccaaggcaacgctatgttctcttgcttttgtcagcaagatagccagatcaatgtcgatcgtggctggctcgaagatacctgcaagaatgtcattgcgctgccattctccaaattgcagttcgcgcttagctggataacgccacggaatgatgtcgtcgtgcacaacaatggtgacttctacagcgcggagaatctcgctctctccaggggaagccgaagtttccaaaaggtcgttgatcaaagctcgccgcgttgtttcatcaagccttacggtcaccgtaaccagcaaatcaatatcactgtgtggcttcaggccgccatccactgcggagccgtacaaatgtacggccagcaacgtcggttcgagatggcgctcgatgacgccaactacctctgatagttgagtcgatacttcggcgatcaccgcttccctcatactcttcctttttcaatattattgaagcatttatcagggttattgtctcatgagcggatacatatttgaatgtatttagaaaaata

SEQ ID NO: 33 - DNA, 15724 bp, synthetic construct
  source 1..15724: mol_type = other DNA
aacaaatagctagctcactcggtcgctacgacattacgccatgaacaagagcgccgccgctggcctgctgggctatgcccgcgtcagcaccgacgaccaggacttgaccaaccaacgggccgaactgcacgcggccggctgcaccaagctgttttccgagaagatcaccggcaccaggcgcgaccgcccggagctggccaggatgcttgaccacctacgccctggcgacgttgtgacagtgaccaggctagaccgcctggcccgcagcacccgcgacctactggacattgccgagcgcatccaggaggccggcgcgggcctgcgtagcctggcagagccgtgggccgacaccaccacgccggccggccgcatggtgttgaccgtgttcgccggcattgccgagttcgagcgttccctaatcatcgaccgcacccggagcgggcgcgaggccgccaaggcccgaggcgtgaagtttggcccccgccctaccctcaccccggcacagatcgcgcacgcccgcgagctgatcgaccaggaaggccgcaccgtgaaagaggcggctgcactgcttggcgtgcatcgctcgaccctgtaccgcgcacttgagcgcagcgaggaagtgacgcccaccgaggccaggcggcgcggtgccttccgtgaggacgcattgaccgaggccgacgccctggcggccgccgagaatgaacgccaagaggaacaagcatgaaaccgcaccaggacggccaggacgaaccgtttttcattaccgaagagatcgaggcggagatgatcgcggccgggtacgtgttcgagccgcccgcgcacgtctcaaccgtgcggctgcatgaaatcctggccggtttgtctgatgccaagctggcggcctggccggccagcttggccgctgaagaaaccgagcgccgccgtctaaaaaggtgatgtgtatttgagtaaaacagcttgcgtcatgcggtcgctgcgtatatgatgcgatgagtaaataaacaaatacgcaaggggaacgcatgaaggttatcgctgtacttaaccagaaaggcgggtcaggcaagacgaccatcgcaacccatctagcccgcgccctgcaactcgccggggccgatgttctgttagtcgattccgatccccagggcagtgcccgcgattgggcggccgtgcgggaagatcaaccgctaaccgttgtcggcatcgaccgcccgacgattgaccgcgacgtgaaggccatcggccggcgcgacttcgtagtgatcgacggagcgccccaggcggcggacttggctgtgtccgcgatcaaggcagccgacttcgtgctgattccggtgcagccaagcccttacgacatatgggccaccgccgacctggtggagctggttaagcagcgcattgaggtcacggatggaaggctacaagcggcctttgtcgtgtcgcgggcgatcaaaggcacgcgcatcggcggtgaggttgccgaggcgctggccgggtacgagctgcccattcttgagtcccgtatcacgcagcgcgtgagctacccaggcactgccgccgccggcacaaccgttcttgaatcagaacccgagggcgacgctgcccgcgaggtccaggcgctggccgctgaaattaaatcaaaactcatttgagttaatgaggtaaagagaaaatgagcaaaagcacaaacacgctaagtgccggccgtccgagcgcacgcagcagcaaggctgcaacgttggccagcctggcagacacgccagccatgaagcgggtcaactttcagttgccggcggaggatcacaccaagctgaagatgtacgcggtacgccaaggcaagaccattaccgagctgctatctgaatacatcgcgcagctaccagagtaaatgagcaaatgaataaatgagtagatgaattttagcggctaaaggaggcggcatggaaaatcaagaacaaccaggcaccgacgccgtggaatgccccatgtgtggaggaacgggcggttggccaggcgtaagcggctgggttgtctgccggccctgcaatggcactggaacccccaagcccgaggaatcggcgtgagcggtcgcaaaccatccggcccggtacaaatcggcgcggcgctgggtgatgacctggtggagaagttgaaggccgcgcaggccgcccagcggcaacgcatcgaggcagaagcacgccccggtgaatcgtggcaagcggccgctgatcgaatccgcaaagaatcccggcaaccgccggcagccggtgcgccgtcgattaggaagccgcccaagggcgacgagcaaccagattttttcgttccgatgctctatgacgtgggcacccgcgatagtcgcagcatcatggacgtggccgttttccgtctgtcgaagcgtgaccgacgagctggcgaggtgatccgctacgagcttccagacgggcacgtagaggtttccgcagggccggccggcatggccagtgtgtgggattacgacctggtactgatggcggtttcccatctaaccgaatccatgaaccgataccgggaagggaagggagacaagcccggccgcgtgttccgtccacacgttgcggacgtactcaagttctgccggcgagccgatggcggaaagcagaaagacgacctggtagaaacctgcattcggttaaacaccacgcacgttgccatgcagcgtacgaagaaggccaagaacggccgcctggtgacggtatccgagggtgaagccttgattagccgctacaagatcgtaaagagcgaaaccgggcggccggagtacatcgagatcgagctagctgattggatgtaccgcgagatcacagaaggcaagaacccggacgtgctgacggttcaccccgattactttttgatcgatcccggcatcggccgttttctctaccgcctggcacgccgcgccgcaggcaaggcagaagccagatggttgttcaagacgatctacgaacgcagtggcagcgccggagagttcaagaagttctgtttcaccgtgcgcaagctgatcgggtcaaatgacctgccggagtacgatttgaaggaggaggcggggcaggctggcccgatcctagtcatgcgctaccgcaacctgatcgagggcgaagcatccgccggttcctaatgtacggagcagatgctagggcaaattgccctagcaggggaaaaaggtcgaaaaggtctctttcctgtggatagcacgtacattgggaacccaaagccgtacattgggaaccggaacccgtacattgggaacccaaagccgtacattgggaaccggtcacacatgtaagtgactgatataaaagagaaaaaaggcgatttttccgcctaaaactctttaaaacttattaaaactcttaaaacccgcctggcctgtgcataactgtctggccagcgcacagccgaagagctgcaaaaagcgcctacccttcggtcgctgcgctccctacgccccgccgcttcgcgtcggcctatcgcggccgctggccgctcaaaaatggctggcctacggccaggcaatctaccagggcgcggacaagccgcgccgtcgccactcgaccgccggcgcccacatcaaggcaccctgcctcgcgcgtttcggtgatgacggtgaaaacctctgacacatgcagctcccggagacggtcacagcttgtctgtaagcggatgccgggagcagacaagcccgtcagggcgcgtcagcgggtgttggcgggtgtcggggcgcagccatgacccagtcacgtagcgatagcggagtgtatactggcttaactatgcggcatcagagcagattgtactgagagtgcaccatatgcggtgtgaaataccgcacagatgcgtaaggagaaaataccgcatcaggcgctcttccgcttcctcgctcactgactcgctgcgctcggtcgttcggctgcggcgagcggtatcagctcactcaaaggcggtaatacggttatccacagaatcaggggataacgcaggaaagaacatgtgagcaaaaggccagcaaaaggccaggaaccgtaaaaaggccgcgttgctggcgtttttccataggctccgcccccctgacgagcatcacaaaaatcgacgctcaagtcagaggtggcgaaacccgacaggactataaagataccaggcgtttccccctggaagctccctcgtgcgctctcctgttccgaccctgccgcttaccggatacctgtccgcctttctcccttcgggaagcgtggcgctttctcatagctcacgctgtaggtatctcagttcggtgtaggtcgttcgctccaagctgggctgtgtgcacgaaccccccgttcagcccgaccgctgcgccttatccggtaactatcgtcttgagtccaacccggtaagacacgacttatcgccactggcagcagccactggtaacaggattagcagagcgaggtatgtaggcggtgctacagagttcttgaagtggtggcctaactacggctacactagaaggacagtatttggtatctgcgctctgctgaagccagttaccttcggaaaaagagttggtagctcttgatccggcaaacaaaccaccgctggtagcggtggtttttttgtttgcaagcagcagattacgcgcagaaaaaaaggatctcaagaagatcctttgatcttttctacggggtctgacgctcagtggaacgaaaactcacgttaagggattttggtcatgcattctaggtatcgcacgcttgtgttgacagctagctcagtcctaggtataatactagtcacgtgaactgccgagtaggtagctgataacaaagtgaagccattgaaatcattggcatgtcggtgaactgccgagtaggtagctgataactcgagagatccggctgctaacaaacccgcttaaggaagatggccaacttatttacataaggctgctgccaccgctgagcaataactagcataaccccttggggcctctaaacgggtcttgaggggttttttggtttaaacccatctaattgggaattccccctgcctcgcgcgtttcggtgatgacggtgaaaacctctgacacagcgatcgcttatgacaacttgacggctacatcattcactttttcttcacaaccggcacggaactcgctcgggctggccccggtgcattttttaaatacccgcgagaaatagagttgatcgtcaaaaccaacattgcgaccgacggtggcgataggcatccgggtggtgctcaaaagcagcttcgcctggctgatacgttggtcctcgcgccagcttaagacgctaatccctaactgctggcggaaaagatgtgacagacgcgacggcgacaagcaaacatgctgtgcgacgctggcgatatcaaaattgctgtctgccaggtgatcgctgatgtactgacaagcctcgcgtacccgattatccatcggtggatggagcgactcgttaatcgcttccatgcgccgcagtaacaattgctcaagcagatttatcgccagcagctccgaatagcgcccttccccttgcccggcgttaatgatttgcccaaacaggtcgctgaaatgcggctggtgcgcttcatccgggcgaaagaaccccgtattggcaaatattgacggccagttaagccattcatgccagtaggcgcgcggacgaaagtaaacccactggtgataccattcgcgagcctccggatgacgaccgtagtgatgaatctctcctggcgggaacagcaaaatatcacccggtcggcaaacaaattctcgtccctgatttttcaccaccccctgaccgcgaatggtgagattgagaatataacctttcattcccagcggtcggtcgataaaaaaatcgagataaccgttggcctcaatcggcgttaaacccgccaccagatgggcattaaacgagtatcccggcagcaggggatcattttgcgcttcagccatacttttcatactcccgccattcagagaagaaaccaattgtccatattgcatcagacattgccgtcactgcgtcttttactggctcttctcgctaaccaaaccggtaaccccgcttattaaaagcattctgtaacaaagcgggaccaaagccatgacaaaaacgcgtaacaaaagtgtctataatcacggcagaaaagtccacattgattatttgcacggcgtcacactttgctatgccatagcatttttatccataagattagcggatcctacctgacgctttttatcgcaactctctactgtttctccatacccgggatccgaattcgagcgaaggagatatacatatgtttttgcaaagacctaaaccttacagcgatgaaagtttagaaagtttctttatccgagtggctaacaaaaatggctacggtgatgtccatcgcttcctagaagccactaaacgattccttcaagacattgaccataatggctatcaaacctttccgactgatataactcggataaacccatactcagctaaaaacagttccagcgcacgaactgcgtcattcctgaaacttgcacaattgacatttaatgaaccgccagagctacttgggttggcaattaacagaacaaacatgaaatactcgccgtcaactagcgcggttgttagaggtgcagaagtctttcctcgcagtttactacggacgcactccatcccctgctgtcctttgtgtctgcgagaaaatggctacgcctcctacctttggcactttcaggggtacgaatactgccacagccataacgtacctttaattaccacttgtagctgtggtaaggagtttgactaccgagtatctgggttaaagggcatttgctgcaaatgcaaggagcctatcaccttaaccagcagggagaacggtcatgaggcagcgtgtactgtttcaaactggcttgctggccatgaatctaaacctctgccaaatcttcctaaaagctaccgatggggtttagttcattggtggatgggtattaaagatagcgagttcgatcacttttcgttcgttcaatttttctcaaactggccaaggtcattccactcgataatcgaagatgaagtagagttcaaccttgagcatgctgttgtcagcacgtctgaattacgactaaaagatcttcttggtcgattgtttttcggttcaattcggttacctgagcggaatcttcaacacaatatcatccttggtgagcttctctgctatttagaaaatcgtttatggcaagacaagggattaatcgccaacctcaaaatgaacgcgttagaggcgactgtaatgttaaattgtagcctcgatcagattgcatcaatggttgaacaacgcatcttgaagccaaatcgaaaaagcaagcccaacagccctcttgatgttaccgattatctatttcatttcggcgatattttctgtctttggttagctgagttccaaagcgatgagtttaaccgttcgttttatgtgtcgaggtggtaaatgcaaactctgaaagaactaatcgcatccaatcctgacgacttaacaactgaacttaagagagcatttcgtccactcacaccgcatattgcaattgatggtaatgaacttgacgcactgacgatattagtcaatttaaccgataagactgatgatcagaaagacctgctcgatcgagccaaatgcaagcaaaaacttcgagatgaaaaatggtgggctagctgcataaattgcgttaattacagacaaagccataacccaaaattcccggatatacgttctgaaggcgtgattcgaacccaagccctgggtgaattaccgagtttcctactctcgtcctcaaaaatcccaccataccattggtcatatagccatgattcaaaatacgtcaacaaaagcgcattcctcaccaatgagttttgttgggatggtgagatctcatgtttgggtgagcttcttaaagatgcagatcacccactttggaatactttgaaaaagttaggttgttctcaaaaaacttgcaaagcaatggcaaaacaactagctgatattactctcacgactatcaatgtcacactcgcaccaaattacctgactcaaatatctctccccgatagtgatacatcctacatttcactctctcctgttgcatcgctatcgatgcaaagccactttcatcagaggctccaagatgaaaatcggcatagcgcgataacgcggtttagccgaactaccaacatgggggtcactgcgatgacatgtggcggcgcatttagaatgttaaagtctggcgctaagttttccagcccccctcatcaccgattaaacagtaaacgaagttggttgacgtcagagcatgttcagtcattaaaacagtaccagcgcctcaacaaaagcctcatacctgaaaactctcggattgcactccgtagaaaatacaaaatcgagcttcaaaatatggtcagatcttggtttgcaatgcaagaccatacccttgattcgaacatacttatccaacatttgaatcatgacctatcttacttaggagccacaaaacgttttgcatacgatccagcgatgaccaagctctttactgagcttttgaaacgagagttatcaaattcaatcaataatggtgagcaacacactaatggatcgtttttagtcctaccgaatatcagggtttgtggcgcaacagctttaagctccccggtaacggtggggattccatcacttacagctttctttggcttcgttcacgcatttgaacggaatataaatcgcaccacctcatcgtttcgtgttgaatcctttgcgatatgcgtccatcaactacatgtcgagaagcgaggtttgacagcagagtttgtggaaaaaggcgacgggactatatccgctcccgcgacccgggatgactggcagtgtgatgtcgtatttagccttattttgaacaccaactttgctcaacatattgaccaagatacgttagttacatcactaccaaagcgattggctcggggttcagcaaaaattgcgattgatgactttaaacatatcaactcattctcgacattagaaacagcgatcgaatctctgccaatagaagctggtaggtggttatcactttacgcacagtcaaacaataatctaagtgatctattagcagccatgacagaggaccatcagctcatggcaagctgcgtcggttaccacttgttagaagagcccaaagataaaccaaactccctcagaggttacaaacacgctatcgccgagtgcatcattggactcattaactcaatcacctttagctcagagactgatcccaacacaatcttttggtcgctaaagaactatcaaaactacctagtggtacagccaaggagtatcaacgatgaaactaccgacaaatctagcctatgagcgctctatcgacccatcagatgtctgtttttttgtcgtctggcccgatgatagaaaaacacctttaacctacaattctcgtactctgctcgggcaaatggaagcggcatcattagcctatgatgtctcaggtcaaccaataaaaagtgccaccgctgaggcgttagctcaagggaaccctcatcaagttgatttctgccacgttccatacggtgcgagtcatattgaatgcagtttctccgtctcgttttcttctgaactacgtcaaccatataagtgtaactcaagcaaagttaaacaaacgctagtgcaattagtcgagctctacgaaacgaaaatcggctggactgagctagcaacccgatatttgatgaacatttgcaacggtaaatggctgtggaaaaatacccgtaaagcctattgctggaacattgtacttacaccttggccttggaacggggaaaaggttggatttgaagatattcgtactaactacacctcacggcaagactttaaaaataataaaaattggtctgctatagttgaaatgatcaaaaccgcattttctagtactgatgggctggcgatatttgaagtcagggccaccttgcacttgccaacgaatgctatggtgcggccaagccaagttttcacagaaaaagaaagtggcagtaaaagtaaatctaaaactcaaaacagtcgagtttttcagagtacaactattgatggtgaacgatcgccaatactaggggcctttaaaacgggagcagctattgcaaccattgacgactggtatcctgaagccactgagccactaagggtcggacggtttggggttcatcgcgaagatgtcacttgctaccgtcatccgtctaccggaaaagattttttctcgatattacaacaagcagagcactatattgaagtgttgagcgccaacaaaactcccgctcaagaaactatcaacgacatgcactttttaatggctaacctgattaagggtgggatgttccagcataaaggagactgactgtgaaatggtattataagacaatcacctttctgccagagttgtgcaacaacgagtcactggctgcaaagtgtctccgcgttctgcatggatttaactatcagtatgagacacgaaatatcggcgtttcatttccgctttggtgtgatgcaacggttggaaaaaagatttcatttgtcagcaagaacaagatagaactcgacttactacttaaacaacactatttcgtccaaatggaacaacttcaatactttcatatatccaacactgttctcgtcccagaagattgtacatacgtttcctttagacgctgtcaatctatagataagctcacagcagcagggctggcaaggaaaatcagacgcctggagaaacgtgctctatctagaggcgagcaatttgacccatcatcttttgctcaaaaagagcatactgcaatagcgcactaccactcacttggggagtccagcaaacagacgaaccgcaactttcgactcaatatcaggatgctctcggagcaaccccgtgaggggaactcgatttttagtagctatggcttatcaaattcagaaaactcgtttcagcctgtacccttaatctgacctttaataaggagatataccatggcgacaagtttacctacgccctcagcaattacgacttcggcgttagagtatgcattccatactcccgctcgcaatctaacgaaatctcgcggaaaaaacattcatcgttatgtcagtgtaaagatgagtaagaggattacggtagaatctactctagagtgtgatgcctgctatcactttgattttgagccaagtattgttcgcttttgcgctcaaccgattcgatttttatattatctcaatggtcagtctcactcctatgttcctgactttctagttcaatttgataccaacgagtttgttctatatgaagtaaagtcagcttatgctaagaacaaacctgattttgatgttgaatgggaggcgaaagtaaaagcagcaactgaactagggctagaattggagcttgttgaagagagtgatattagggatacggttgtattaaataatcttaagcgcatgcatcgttatgcttcgaaagatgagctgaataacgtacataactctctcttaaaaataataaagtacaatggcgcccaatctgcaagatgcttgggagaacagttgggtttaaaaggccgaactgttttaccaattttgtgcgatttgctgtcaaggtgtttactcgatacacgtttggataagcctctatctcttgaatctcgatttgagttggccagttatggctaagaaagggttctcaagtttccatagaaaagcagtctcttcccaagatacgcttgaatcgatagagcttgtctctagcgctaattgtctagaaagtgttacgtatcaagatatatcagcatttcccgaaacaattgcggtagagattaatttccgattaagcattcttcgctttttagcgcgaaagtgcgaaaccattgtggccaaatcaattgaaccacatcgtgtagagctacagcaaaactatagtagaaaaatacccagtgcaataacgatatatcgatggtggcttgcttttcgaaaatcagactacaaccccattagcttagcacctaatatcaaggatagaggtaatagagagacaaaagtgtcaacagttgttgattctattatggaacaggcagttgaaagagttatatctggacgaaaagtcaatgttagctctgcatataaacgtgttcgacgaaaagttcgtcaatacaatctaactcatggaacgaaatacacgtatcctaagtacgaatctgtaagaaagcgagtaaaaaagaaaaccccatttgagttattagccgcagggaaaggggagagagtagctaagagagagtttcgccgaatgggaaaaaagatcctcacgtctagcgtgctagagagggttgaaatagatcacactgtcgttgacctttttgcagtacacgaagagtatcgaatcccattgggccgaccttggcttactcaattggttgattgttacagtaaagctgtaatcggtttttatttaggtttcgagcctcctagctatgtgtcggtttcccttgcacttaagaatgcaatacaacgcaaagatgacttaatctcctcgtatgaatcgatcgagaatgaatggctatgttatggcatcccagacctactcgtaactgataatggtaaagagtttttgtcgaaagcatttgatcaagcatgtgaatcactattgatcaatgtgcatcaaaataaagttgagacgcccgacaacaaacctcatgttgaacgtaactacgggactattaatacttctctgttagacgatttacctgggaaatccttcagccagtaccttcaaagagaagggtacgactctgtgggagaagctacccttacactcaatgagattagagaaatttacttaatttggttggtggatatttatcataaaaaacccaatcagagaggcactaattgtcctaatgttgcgtggaaaaagggttgtcaagaatgggaaccagaggagttctctggttctaaagacgaattagactttaaatttgctattgttgattacaaacaacttactaaagtagggataactgtctacaaagaactgagttatagcaatgaccgtttagctgaatatagagggaagaaaggaaaccataaagttcagttcaagtataaccctgagtgtatggcagttatttgggtgttggatgaggatatgaatgagtactttacagttaatgcgattgactacgaatatgcaagtagagtatcactttggcaacataaatataacatgaaatatcaagcagaactaaattcagcagaatatgatgaggacaaggaaattgatgcagaaataaaaattgaagaaatcgcagatcgttcaattgttaagactaacaaaatcagagctcggaggcgtggcgctaggcatcaagagaatagcgcaagggctaagtcaatcagtaatgcgaacccggcctcgatacaaaaacatgaagatgaaatcgttagtgcagataatgacgattgggatattgattatgtctgagaaatcgtcaaatgagtgaaacgcgtgaggctcgtatatcaagagctaaaagggcatttgtatccacaccgagcgttaggaaaatcttgagttacatggatagatgtagagatctatcagacctagagtctgagcctacatgcatgatggtctatggtgcttcgggtgtaggtaaaacgaccgtcatcaagaaatacttaaatcaaaacagaagagagtccgaagccgggggcgatataataccggttttgcatattgagttgccagacaatgcgaagccagtagatgcagcaagggaattgctggttgaaatgggtgacccgctagcactttatgaaactgacttagctagattgacgaaaagactgactgaattaatccctgcggtcggcgtgaagctgattattatcgatgagttccaacatttggtggaagaaaggtcaaatcgggttcttacccaagtaggtaattggctaaaaatgatacttaacaaaacgaaatgtccaattgttatatttggtatgccatactcaaaagttgtactgcaagcaaactcgcaacttcacgggcgattttccattcaggttgaactgcgcccctttagctaccagggaggtagaggtgtatttaaaacttttttggaataccttgataaagccctaccttttgaaaaacaggctggcttagccaacgaaagtttgcagaaaaaattgtatgcattctctcagggaaacatgcgttcgttgagaaaccttatttatcaagcatctatcgaagcaattgataatcagcatgagacgataaccgaagaagatttcgtttttgcatcgaagttgacatcgggcgataaacccaactcatggaaaaatccttttgaggagggtgttgaggtaacagaagatatgttacgaccgccaccaaaagatattggttgggaggactatttgagacattcaaccccgagagtgagtaaaccaggtagaaataaaaactttttcgaataacctaggctgctgcgctgctgccaccgctgagcaataactagcataaccccttggggcctctaaacgggtcttgaggggttttttgctgaaacctcaggcattgaacctgcacggtaccgagctcgaattcactggccgtcgttttacaacgtcgtgactgggaaaaccctggcgttacccaacttaatcgccttgctatcgtggccggatcttgcggcccctcggcttgaacgaattgttagacattatttgccgactaccttggtgatctcgcctttcacgtagtggacaaattcttccaactgatctgcgcgcgaggccaagcgatcttcttcttgtccaagataagcctgtctagcttcaagtatgacgggctgatactgggccggcaggcgctccattgcccagtcggcagcgacatccttcggcgcgattttgccggttactgcgctgtaccaaatgcgggacaacgtaagcactacatttcgctcatcgccagcccagtcgggcggcgagttccatagcgttaaggtttcatttagcgcctcaaatagatcctgttcaggaaccggatcaaagagttcctccgccgctggacctaccaaggcaacgctatgttctcttgcttttgtcagcaagatagccagatcaatgtcgatcgtggctggctcgaagatacctgcaagaatgtcattgcgctgccattctccaaattgcagttcgcgcttagctggataacgccacggaatgatgtcgtcgtgcacaacaatggtgacttctacagcgcggagaatctcgctctctccaggggaagccgaagtttccaaaaggtcgttgatcaaagctcgccgcgttgtttcatcaagccttacggtcaccgtaaccagcaaatcaatatcactgtgtggcttcaggccgccatccactgcggagccgtacaaatgtacggccagcaacgtcggttcgagatggcgctcgatgacgccaactacctctgatagttgagtcgatacttcggcgatcaccgcttccctcatactcttcctttttcaatattattgaagcatttatcagggttattgtctcatgagcggatacatatttgaatgtatttagaaaaata

SEQ ID NO: 34 - DNA, 15724 bp, synthetic construct
  source 1..15724: mol_type = other DNA
aacaaatagctagctcactcggtcgctacgacattacgccatgaacaagagcgccgccgctggcctgctgggctatgcccgcgtcagcaccgacgaccaggacttgaccaaccaacgggccgaactgcacgcggccggctgcaccaagctgttttccgagaagatcaccggcaccaggcgcgaccgcccggagctggccaggatgcttgaccacctacgccctggcgacgttgtgacagtgaccaggctagaccgcctggcccgcagcacccgcgacctactggacattgccgagcgcatccaggaggccggcgcgggcctgcgtagcctggcagagccgtgggccgacaccaccacgccggccggccgcatggtgttgaccgtgttcgccggcattgccgagttcgagcgttccctaatcatcgaccgcacccggagcgggcgcgaggccgccaaggcccgaggcgtgaagtttggcccccgccctaccctcaccccggcacagatcgcgcacgcccgcgagctgatcgaccaggaaggccgcaccgtgaaagaggcggctgcactgcttggcgtgcatcgctcgaccctgtaccgcgcacttgagcgcagcgaggaagtgacgcccaccgaggccaggcggcgcggtgccttccgtgaggacgcattgaccgaggccgacgccctggcggccgccgagaatgaacgccaagaggaacaagcatgaaaccgcaccaggacggccaggacgaaccgtttttcattaccgaagagatcgaggcggagatgatcgcggccgggtacgtgttcgagccgcccgcgcacgtctcaaccgtgcggctgcatgaaatcctggccggtttgtctgatgccaagctggcggcctggccggccagcttggccgctgaagaaaccgagcgccgccgtctaaaaaggtgatgtgtatttgagtaaaacagcttgcgtcatgcggtcgctgcgtatatgatgcgatgagtaaataaacaaatacgcaaggggaacgcatgaaggttatcgctgtacttaaccagaaaggcgggtcaggcaagacgaccatcgcaacccatctagcccgcgccctgcaactcgccggggccgatgttctgttagtcgattccgatccccagggcagtgcccgcgattgggcggccgtgcgggaagatcaaccgctaaccgttgtcggcatcgaccgcccgacgattgaccgcgacgtgaaggccatcggccggcgcgacttcgtagtgatcgacggagcgccccaggcggcggacttggctgtgtccgcgatcaaggcagccgacttcgtgctgattccggtgcagccaagcccttacgacatatgggccaccgccgacctggtggagctggttaagcagcgcattgaggtcacggatggaaggctacaagcggcctttgtcgtgtcgcgggcgatcaaaggcacgcgcatcggcggtgaggttgccgaggcgctggccgggtacgagctgcccattcttgagtcccgtatcacgcagcgcgtgagctacccaggcactgccgccgccggcacaaccgttcttgaatcagaacccgagggcgacgctgcccgcgaggtccaggcgctggccgctgaaattaaatcaaaactcatttgagttaatgaggtaaagagaaaatgagcaaaagcacaaacacgctaagtgccggccgtccgagcgcacgcagcagcaaggctgcaacgttggccagcctggcagacacgccagccatgaagcgggtcaactttcagttgccggcggaggatcacaccaagctgaagatgtacgcggtacgccaaggcaagaccattaccgagctgctatctgaatacatcgcgcagctaccagagtaaatgagcaaatgaataaatgagtagatgaattttagcggctaaaggaggcggcatggaaaatcaagaacaaccaggcaccgacgccgtggaatgccccatgtgtggaggaacgggcggttggccaggcgtaagcggctgggttgtctgccggccctgcaatggcactggaacccccaagcccgaggaatcggcgtgagcggtcgcaaaccatccggcccggtacaaatcggcgcggcgctgggtgatgacctggtggagaagttgaaggccgcgcaggccgcccagcggcaacgcatcgaggcagaagcacgccccggtgaatcgtggcaagcggccgctgatcgaatccgcaaagaatcccggcaaccgccggcagccggtgcgccgtcgattaggaagccgcccaagggcgacgagcaaccagattttttcgttccgatgctctatgacgtgggcacccgcgatagtcgcagcatcatggacgtggccgttttccgtctgtcgaagcgtgaccgacgagctggcgaggtgatccgctacgagcttccagacgggcacgtagaggtttccgcagggccggccggcatggccagtgtgtgggattacgacctggtactgatggcggtttcccatctaaccgaatccatgaaccgataccgggaagggaagggagacaagcccggccgcgtgttccgtccacacgttgcggacgtactcaagttctgccggcgagccgatggcggaaagcagaaagacgacctggtagaaacctgcattcggttaaacaccacgcacgttgccatgcagcgtacgaagaaggccaagaacggccgcctggtgacggtatccgagggtgaagccttgattagccgctacaagatcgtaaagagcgaaaccgggcggccggagtacatcgagatcgagctagctgattggatgtaccgcgagatcacagaaggcaagaacccggacgtgctgacggttcaccccgattactttttgatcgatcccggcatcggccgttttctctaccgcctggcacgccgcgccgcaggcaaggcagaagccagatggttgttcaagacgatctacgaacgcagtggcagcgccggagagttcaagaagttctgtttcaccgtgcgcaagctgatcgggtcaaatgacctgccggagtacgatttgaaggaggaggcggggcaggctggcccgatcctagtcatgcgctaccgcaacctgatcgagggcgaagcatccgccggttcctaatgtacggagcagatgctagggcaaattgccctagcaggggaaaaaggtcgaaaaggtctctttcctgtggatagcacgtacattgggaacccaaagccgtacattgggaaccggaacccgtacattgggaacccaaagccgtacattgggaaccggtcacacatgtaagtgactgatataaaagagaaaaaaggcgatttttccgcctaaaactctttaaaacttattaaaactcttaaaacccgcctggcctgtgcataactgtctggccagcgcacagccgaagagctgcaaaaagcgcctacccttcggtcgctgcgctccctacgccccgccgcttcgcgtcggcctatcgcggccgctggccgctcaaaaatggctggcctacggccaggcaatctaccagggcgcggacaagccgcgccgtcgccactcgaccgccggcgcccacatcaaggcaccctgcctcgcgcgtttcggtgatgacggtgaaaacctctgacacatgcagctcccggagacggtcacagcttgtctgtaagcggatgccgggagcagacaagcccgtcagggcgcgtcagcgggtgttggcgggtgtcggggcgcagccatgacccagtcacgtagcgatagcggagtgtatactggcttaactatgcggcatcagagcagattgtactgagagtgcaccatatgcggtgtgaaataccgcacagatgcgtaaggagaaaataccgcatcaggcgctcttccgcttcctcgctcactgactcgctgcgctcggtcgttcggctgcggcgagcggtatcagctcactcaaaggcggtaatacggttatccacagaatcaggggataacgcaggaaagaacatgtgagcaaaaggccagcaaaaggccaggaaccgtaaaaaggccgcgttgctggcgtttttccataggctccgcccccctgacgagcatcacaaaaatcgacgctcaagtcagaggtggcgaaacccgacaggactataaagataccaggcgtttccccctggaagctccctcgtgcgctctcctgttccgaccctgccgcttaccggatacctgtccgcctttctcccttcgggaagcgtggcgctttctcatagctcacgctgtaggtatctcagttcggtgtaggtcgttcgctccaagctgggctgtgtgcacgaaccccccgttcagcccgaccgctgcgccttatccggtaactatcgtcttgagtccaacccggtaagacacgacttatcgccactggcagcagccactggtaacaggattagcagagcgaggtatgtaggcggtgctacagagttcttgaagtggtggcctaactacggctacactagaaggacagtatttggtatctgcgctctgctgaagccagttaccttcggaaaaagagttggtagctcttgatccggcaaacaaaccaccgctggtagcggtggtttttttgtttgcaagcagcagattacgcgcagaaaaaaaggatctcaagaagatcctttgatcttttctacggggtctgacgctcagtggaacgaaaactcacgttaagggattttggtcatgcattctaggtatcgcacgcttgtgttgacagctagctcagtcctaggtataatactagtcacgtgaactgccgagtaggtagctgataacgtcatgcaatttgtgttctcgccgatccttgggtgaactgccgagtaggtagctgataactcgagagatccggctgctaacaaacccgcttaaggaagatggccaacttatttacataaggctgctgccaccgctgagcaataactagcataaccccttggggcctctaaacgggtcttgaggggttttttggtttaaacccatctaattgggaattccccctgcctcgcgcgtttcggtgatgacggtgaaaacctctgacacagcgatcgcttatgacaacttgacggctacatcattcactttttcttcacaaccggcacggaactcgctcgggctggccccggtgcattttttaaatacccgcgagaaatagagttgatcgtcaaaaccaacattgcgaccgacggtggcgataggcatccgggtggtgctcaaaagcagcttcgcctggctgatacgttggtcctcgcgccagcttaagacgctaatccctaactgctggcggaaaagatgtgacagacgcgacggcgacaagcaaacatgctgtgcgacgctggcgatatcaaaattgctgtctgccaggtgatcgctgatgtactgacaagcctcgcgtacccgattatccatcggtggatggagcgactcgttaatcgcttccatgcgccgcagtaacaattgctcaagcagatttatcgccagcagctccgaatagcgcccttccccttgcccggcgttaatgatttgcccaaacaggtcgctgaaatgcggctggtgcgcttcatccgggcgaaagaaccccgtattggcaaatattgacggccagttaagccattcatgccagtaggcgcgcggacgaaagtaaacccactggtgataccattcgcgagcctccggatgacgaccgtagtgatgaatctctcctggcgggaacagcaaaatatcacccggtcggcaaacaaattctcgtccctgatttttcaccaccccctgaccgcgaatggtgagattgagaatataacctttcattcccagcggtcggtcgataaaaaaatcgagataaccgttggcctcaatcggcgttaaacccgccaccagatgggcattaaacgagtatcccggcagcaggggatcattttgcgcttcagccatacttttcatactcccgccattcagagaagaaaccaattgtccatattgcatcagacattgccgtcactgcgtcttttactggctcttctcgctaaccaaaccggtaaccccgcttattaaaagcattctgtaacaaagcgggaccaaagccatgacaaaaacgcgtaacaaaagtgtctataatcacggcagaaaagtccacattgattatttgcacggcgtcacactttgctatgccatagcatttttatccataagattagcggatcctacctgacgctttttatcgcaactctctactgtttctccatacccgggatccgaattcgagcgaaggagatatacatatgtttttgcaaagacctaaaccttacagcgatgaaagtttagaaagtttctttatccgagtggctaacaaaaatggctacggtgatgtccatcgcttcctagaagccactaaacgattccttcaagacattgaccataatggctatcaaacctttccgactgatataactcggataaacccatactcagctaaaaacagttccagcgcacgaactgcgtcattcctgaaacttgcacaattgacatttaatgaaccgccagagctacttgggttggcaattaacagaacaaacatgaaatactcgccgtcaactagcgcggttgttagaggtgcagaagtctttcctcgcagtttactacggacgcactccatcccctgctgtcctttgtgtctgcgagaaaatggctacgcctcctacctttggcactttcaggggtacgaatactgccacagccataacgtacctttaattaccacttgtagctgtggtaaggagtttgactaccgagtatctgggttaaagggcatttgctgcaaatgcaaggagcctatcaccttaaccagcagggagaacggtcatgaggcagcgtgtactgtttcaaactggcttgctggccatgaatctaaacctctgccaaatcttcctaaaagctaccgatggggtttagttcattggtggatgggtattaaagatagcgagttcgatcacttttcgttcgttcaatttttctcaaactggccaaggtcattccactcgataatcgaagatgaagtagagttcaaccttgagcatgctgttgtcagcacgtctgaattacgactaaaagatcttcttggtcgattgtttttcggttcaattcggttacctgagcggaatcttcaacacaatatcatccttggtgagcttctctgctatttagaaaatcgtttatggcaagacaagggattaatcgccaacctcaaaatgaacgcgttagaggcgactgtaatgttaaattgtagcctcgatcagattgcatcaatggttgaacaacgcatcttgaagccaaatcgaaaaagcaagcccaacagccctcttgatgttaccgattatctatttcatttcggcgatattttctgtctttggttagctgagttccaaagcgatgagtttaaccgttcgttttatgtgtcgaggtggtaaatgcaaactctgaaagaactaatcgcatccaatcctgacgacttaacaactgaacttaagagagcatttcgtccactcacaccgcatattgcaattgatggtaatgaacttgacgcactgacgatattagtcaatttaaccgataagactgatgatcagaaagacctgctcgatcgagccaaatgcaagcaaaaacttcgagatgaaaaatggtgggctagctgcataaattgcgttaattacagacaaagccataacccaaaattcccggatatacgttctgaaggcgtgattcgaacccaagccctgggtgaattaccgagtttcctactctcgtcctcaaaaatcccaccataccattggtcatatagccatgattcaaaatacgtcaacaaaagcgcattcctcaccaatgagttttgttgggatggtgagatctcatgtttgggtgagcttcttaaagatgcagatcacccactttggaatactttgaaaaagttaggttgttctcaaaaaacttgcaaagcaatggcaaaacaactagctgatattactctcacgactatcaatgtcacactcgcaccaaattacctgactcaaatatctctccccgatagtgatacatcctacatttcactctctcctgttgcatcgctatcgatgcaaagccactttcatcagaggctccaagatgaaaatcggcatagcgcgataacgcggtttagccgaactaccaacatgggggtcactgcgatgacatgtggcggcgcatttagaatgttaaagtctggcgctaagttttccagcccccctcatcaccgattaaacagtaaacgaagttggttgacgtcagagcatgttcagtcattaaaacagtaccagcgcctcaacaaaagcctcatacctgaaaactctcggattgcactccgtagaaaatacaaaatcgagcttcaaaatatggtcagatcttggtttgcaatgcaagaccatacccttgattcgaacatacttatccaacatttgaatcatgacctatcttacttaggagccacaaaacgttttgcatacgatccagcgatgaccaagctctttactgagcttttgaaacgagagttatcaaattcaatcaataatggtgagcaacacactaatggatcgtttttagtcctaccgaatatcagggtttgtggcgcaacagctttaagctccccggtaacggtggggattccatcacttacagctttctttggcttcgttcacgcatttgaacggaatataaatcgcaccacctcatcgtttcgtgttgaatcctttgcgatatgcgtccatcaactacatgtcgagaagcgaggtttgacagcagagtttgtggaaaaaggcgacgggactatatccgctcccgcgacccgggatgactggcagtgtgatgtcgtatttagccttattttgaacaccaactttgctcaacatattgaccaagatacgttagttacatcactaccaaagcgattggctcggggttcagcaaaaattgcgattgatgactttaaacatatcaactcattctcgacattagaaacagcgatcgaatctctgccaatagaagctggtaggtggttatcactttacgcacagtcaaacaataatctaagtgatctattagcagccatgacagaggaccatcagctcatggcaagctgcgtcggttaccacttgttagaagagcccaaagataaaccaaactccctcagaggttacaaacacgctatcgccgagtgcatcattggactcattaactcaatcacctttagctcagagactgatcccaacacaatcttttggtcgctaaagaactatcaaaactacctagtggtacagccaaggagtatcaacgatgaaactaccgacaaatctagcctatgagcgctctatcgacccatcagatgtctgtttttttgtcgtctggcccgatgatagaaaaacacctttaacctacaattctcgtactctgctcgggcaaatggaagcggcatcattagcctatgatgtctcaggtcaaccaataaaaagtgccaccgctgaggcgttagctcaagggaaccctcatcaagttgatttctgccacgttccatacggtgcgagtcatattgaatgcagtttctccgtctcgttttcttctgaactacgtcaaccatataagtgtaactcaagcaaagttaaacaaacgctagtgcaattagtcgagctctacgaaacgaaaatcggctggactgagctagcaacccgatatttgatgaacatttgcaacggtaaatggctgtggaaaaatacccgtaaagcctattgctggaacattgtacttacaccttggccttggaacggggaaaaggttggatttgaagatattcgtactaactacacctcacggcaagactttaaaaataataaaaattggtctgctatagttgaaatgatcaaaaccgcattttctagtactgatgggctggcgatatttgaagtcagggccaccttgcacttgccaacgaatgctatggtgcggccaagccaagttttcacagaaaaagaaagtggcagtaaaagtaaatctaaaactcaaaacagtcgagtttttcagagtacaactattgatggtgaacgatcgccaatactaggggcctttaaaacgggagcagctattgcaaccattgacgactggtatcctgaagccactgagccactaagggtcggacggtttggggttcatcgcgaagatgtcacttgctaccgtcatccgtctaccggaaaagattttttctcgatattacaacaagcagagcactatattgaagtgttgagcgccaacaaaactcccgctcaagaaactatcaacgacatgcactttttaatggctaacctgattaagggtgggatgttccagcataaaggagactgactgtgaaatggtattataagacaatcacctttctgccagagttgtgcaacaacgagtcactggctgcaaagtgtctccgcgttctgcatggatttaactatcagtatgagacacgaaatatcggcgtttcatttccgctttggtgtgatgcaacggttggaaaaaagatttcatttgtcagcaagaacaagatagaactcgacttactacttaaacaacactatttcgtccaaatggaacaacttcaatactttcatatatccaacactgttctcgtcccagaagattgtacatacgtttcctttagacgctgtcaatctatagataagctcacagcagcagggctggcaaggaaaatcagacgcctggagaaacgtgctctatctagaggcgagcaatttgacccatcatcttttgctcaaaaagagcatactgcaatagcgcactaccactcacttggggagtccagcaaacagacgaaccgcaactttcgactcaatatcaggatgctctcggagcaaccccgtgaggggaactcgatttttagtagctatggcttatcaaattcagaaaactcgtttcagcctgtacccttaatctgacctttaataaggagatataccatggcgacaagtttacctacgccctcagcaattacgacttcggcgttagagtatgcattccatactcccgctcgcaatctaacgaaatctcgcggaaaaaacattcatcgttatgtcagtgtaaagatgagtaagaggattacggtagaatctactctagagtgtgatgcctgctatcactttgattttgagccaagtattgttcgcttttgcgctcaaccgattcgatttttatattatctcaatggtcagtctcactcctatgttcctgactttctagttcaatttgataccaacgagtttgttctatatgaagtaaagtcagcttatgctaagaacaaacctgattttgatgttgaatgggaggcgaaagtaaaagcagcaactgaactagggctagaattggagcttgttgaagagagtgatattagggatacggttgtattaaataatcttaagcgcatgcatcgttatgcttcgaaagatgagctgaataacgtacataactctctcttaaaaataataaagtacaatggcgcccaatctgcaagatgcttgggagaacagttgggtttaaaaggccgaactgttttaccaattttgtgcgatttgctgtcaaggtgtttactcgatacacgtttggataagcctctatctcttgaatctcgatttgagttggccagttatggctaagaaagggttctcaagtttccatagaaaagcagtctcttcccaagatacgcttgaatcgatagagcttgtctctagcgctaattgtctagaaagtgttacgtatcaagatatatcagcatttcccgaaacaattgcggtagagattaatttccgattaagcattcttcgctttttagcgcgaaagtgcgaaaccattgtggccaaatcaattgaaccacatcgtgtagagctacagcaaaactatagtagaaaaatacccagtgcaataacgatatatcgatggtggcttgcttttcgaaaatcagactacaaccccattagcttagcacctaatatcaaggatagaggtaatagagagacaaaagtgtcaacagttgttgattctattatggaacaggcagttgaaagagttatatctggacgaaaagtcaatgttagctctgcatataaacgtgttcgacgaaaagttcgtcaatacaatctaactcatggaacgaaatacacgtatcctaagtacgaatctgtaagaaagcgagtaaaaaagaaaaccccatttgagttattagccgcagggaaaggggagagagtagctaagagagagtttcgccgaatgggaaaaaagatcctcacgtctagcgtgctagagagggttgaaatagatcacactgtcgttgacctttttgcagtacacgaagagtatcgaatcccattgggccgaccttggcttactcaattggttgattgttacagtaaagctgtaatcggtttttatttaggtttcgagcctcctagctatgtgtcggtttcccttgcacttaagaatgcaatacaacgcaaagatgacttaatctcctcgtatgaatcgatcgagaatgaatggctatgttatggcatcccagacctactcgtaactgataatggtaaagagtttttgtcgaaagcatttgatcaagcatgtgaatcactattgatcaatgtgcatcaaaataaagttgagacgcccgacaacaaacctcatgttgaacgtaactacgggactattaatacttctctgttagacgatttacctgggaaatccttcagccagtaccttcaaagagaagggtacgactctgtgggagaagctacccttacactcaatgagattagagaaatttacttaatttggttggtggatatttatcataaaaaacccaatcagagaggcactaattgtcctaatgttgcgtggaaaaagggttgtcaagaatgggaaccagaggagttctctggttctaaagacgaattagactttaaatttgctattgttgattacaaacaacttactaaagtagggataactgtctacaaagaactgagttatagcaatgaccgtttagctgaatatagagggaagaaaggaaaccataaagttcagttcaagtataaccctgagtgtatggcagttatttgggtgttggatgaggatatgaatgagtactttacagttaatgcgattgactacgaatatgcaagtagagtatcactttggcaacataaatataacatgaaatatcaagcagaactaaattcagcagaatatgatgaggacaaggaaattgatgcagaaataaaaattgaagaaatcgcagatcgttcaattgttaagactaacaaaatcagagctcggaggcgtggcgctaggcatcaagagaatagcgcaagggctaagtcaatcagtaatgcgaacccggcctcgatacaaaaacatgaagatgaaatcgttagtgcagataatgacgattgggatattgattatgtctgagaaatcgtcaaatgagtgaaacgcgtgaggctcgtatatcaagagctaaaagggcatttgtatccacaccgagcgttaggaaaatcttgagttacatggatagatgtagagatctatcagacctagagtctgagcctacatgcatgatggtctatggtgcttcgggtgtaggtaaaacgaccgtcatcaagaaatacttaaatcaaaacagaagagagtccgaagccgggggcgatataataccggttttgcatattgagttgccagacaatgcgaagccagtagatgcagcaagggaattgctggttgaaatgggtgacccgctagcactttatgaaactgacttagctagattgacgaaaagactgactgaattaatccctgcggtcggcgtgaagctgattattatcgatgagttccaacatttggtggaagaaaggtcaaatcgggttcttacccaagtaggtaattggctaaaaatgatacttaacaaaacgaaatgtccaattgttatatttggtatgccatactcaaaagttgtactgcaagcaaactcgcaacttcacgggcgattttccattcaggttgaactgcgcccctttagctaccagggaggtagaggtgtatttaaaacttttttggaataccttgataaagccctaccttttgaaaaacaggctggcttagccaacgaaagtttgcagaaaaaattgtatgcattctctcagggaaacatgcgttcgttgagaaaccttatttatcaagcatctatcgaagcaattgataatcagcatgagacgataaccgaagaagatttcgtttttgcatcgaagttgacatcgggcgataaacccaactcatggaaaaatccttttgaggagggtgttgaggtaacagaagatatgttacgaccgccaccaaaagatattggttgggaggactatttgagacattcaaccccgagagtgagtaaaccaggtagaaataaaaactttttcgaataacctaggctgctgcgctgctgccaccgctgagcaataactagcataaccccttggggcctctaaacgggtcttgaggggttttttgctgaaacctcaggcattgaacctgcacggtaccgagctcgaattcactggccgtcgttttacaacgtcgtgactgggaaaaccctggcgttacccaacttaatcgccttgctatcgtggccggatcttgcggcccctcggcttgaacgaattgttagacattatttgccgactaccttggtgatctcgcctttcacgtagtggacaaattcttccaactgatctgcgcgcgaggccaagcgatcttcttcttgtccaagataagcctgtctagcttcaagtatgacgggctgatactgggccggcaggcgctccattgcccagtcggcagcgacatccttcggcgcgattttgccggttactgcgctgtaccaaatgcgggacaacgtaagcactacatttcgctcatcgccagcccagtcgggcggcgagttccatagcgttaaggtttcatttagcgcctcaaatagatcctgttcaggaaccggatcaaagagttcctccgccgctggacctaccaaggcaacgctatgttctcttgcttttgtcagcaagatagccagatcaatgtcgatcgtggctggctcgaagatacctgcaagaatgtcattgcgctgccattctccaaattgcagttcgcgcttagctggataacgccacggaatgatgtcgtcgtgcacaacaatggtgacttctacagcgcggagaatctcgctctctccaggggaagccgaagtttccaaaaggtcgttgatcaaagctcgccgcgttgtttcatcaagccttacggtcaccgtaaccagcaaatcaatatcactgtgtggcttcaggccgccatccactgcggagccgtacaaatgtacggccagcaacgtcggttcgagatggcgctcgatgacgccaactacctctgatagttgagtcgatacttcggcgatcaccgcttccctcatactcttcctttttcaatattattgaagcatttatcagggttattgtctcatgagcggatacatatttgaatgtatttagaaaaata

SEQ ID NO: 35 - DNA, 15412 bp, synthetic construct
  source 1..15412: mol_type = other DNA
tagctagctcactcggtcgctacgctccgggcgtgagactgcggcgggcgctgcggacacatacaaagttacccacagattccgtggataagcaggggactaacatgtgaggcaaaacagcagggccgcgccggtggcgtttttccataggctccgccctcctgccagagttcacataaacagacgcttttccggtgcatctgtgggagccgtgaggctcaaccatgaatctgacagtacgggcgaaacccgacaggacttaaagatccccaccgtttccggcgggtcgctccctcttgcgctctcctgttccgaccctgccgtttaccggatacctgttccgcctttctcccttacgggaagtgtggcgctttctcatagctcacacactggtatctcggctcggtgtaggtcgttcgctccaagctgggctgtaagcaagaactccccgttcagcccgactgctgcgccttatccggtaactgttcacttgagtccaacccggaaaagcacggtaaaacgccactggcagcagccattggtaactgggagttcgcagaggatttgtttagctaaacacgcggttgctcttgaagtgtgcgccaaagtccggctacactggaaggacagatttggttgctgtgctctgcgaaagccagttaccacggttaagcagttccccaactgacttaaccttcgatcaaaccacctccccaggtggttttttcgtttacagggcaaaagattacgcgcagaaaaaaaggatctcaagaagatcctttgatcttttctactgaaccgctctagatttcagtgcaatttatctcttcaaatgtagcacctgaagtcagccccatacgatataagttgtaattctcatgttagtcatgccccgcgcccaccggaaggagctgactgggttgaaggctctcaagggcatcggtcgagatcccggtgcctaatgagtgagctaacttacattaattgcgttgcgctcactgcccgctttccagtcgggaaacctgtcgtgccagctgcattaatgaatcggccaacgcgcggggagaggcggtttgcgtattgggcgccagggtggtttttcttttcaccagtgagacgggcaacagctgattgcccttcaccgcctggccctgagagagttgcagcaagcggtccacgctggtttgccccagcaggcgaaaatcctgtttgatggtggttaacggcgggatataacatgagctgtcttcggtatcgtcgtatcccactaccgagatgtccgcaccaacgcgcagcccggactcggtaatggcgcgcattgcgcccagcgccatctgatcgttggcaaccagcatcgcagtgggaacgatgccctcattcagcatttgcatggtttgttgaaaaccggacatggcactccagtcgccttcccgttccgctatcggctgaatttgattgcgagtgagatatttatgccagccagccagacgcagacgcgccgagacagaacttaatgggcccgctaacagcgcgatttgctggtgacccaatgcgaccagatgctccacgcccagtcgcgtaccgtcttcatgggagaaaataatactgttgatgggtgtctggtcagagacatcaagaaataacgccggaacattagtgcaggcagcttccacagcaatggcatcctggtcatccagcggatagttaatgatcagcccactgacgcgttgcgcgagaagattgtgcaccgccgctttacaggcttcgacgccgcttcgttctaccatcgacaccaccacgctggcacccagttgatcggcgcgagatttaatcgccgcgacaatttgcgacggcgcgtgcagggccagactggaggtggcaacgccaatcagcaacgactgtttgcccgccagttgttgtgccacgcggttgggaatgtaattcagctccgccatcgccgcttccactttttcccgcgttttcgcagaaacgtggctggcctggttcaccacgcgggaaacggtctgataagagacaccggcatactctgcgacatcgtataacgttactggtttcacattcaccaccctgaattgactctcttccgggcgctatcatgccataccgcgaaaggttttgcgccattcgatggtgtccaaataaaacgaaaggctcagtcgaaagactgggcctttcgttttatctgttgtttgtcggtgaacgctctcctgagtaggacaaatgcggccgctaatgtgagttagctcactcattaggcaccccaggctttacactttatgcttccggctcgtatgttgtgtggaattgtgagcggataacaagtcgacgtaacctgccggataggcagccaagaatgagacctctgtcttgtcagctagggtggtctcgtaacctgccggataggcagccaagaattagcctgcaggaattccgagcgaaggagatatacatatgcttaatccaatagagctttatgaagatgaatcgctagagagctgtttattaaggatcagtcagaataattgctatgattcatttcaggattttagcgatgaagtttggtttcaagtcaaagaagaggatcgtgaggttcgaggaactttccctgcaaccctaaatacggtaaatatctatcactctcacacatcaagtgacttaaagctcaaagcactaattaaaattgagcagtggcttgagataaataactcccctttattaaaaagcgccttgagcagatcaagcagtactttcttacgccaacattctgctgtttttagaaatggtgttgatataccaagaatcctgctcagaaaaaatggtattccagtatgccctgagtgcctaaaagagaacgaatacatacgtcaagaatggcacttcatcactcacgatgtatgcacaaggcataaaataggtctattacatcactgcccagagtgtaaagcctctatcaattatcaaaaaattgaaaacattacggtttgtcagtgtggattcaaattcagtgatcacttagctccgcaagcaaatagcaatgccttactcattgcacaatggcttaacggcgaaaatactaaattagctaatatttggggagaacaccaagcaatatcatctcgctttggtgtcttactttggtatatcaatagatataatctgacagatgatttttctacttcatttgtaaaatattcattgaattggccctcgaacttctattccgaactcgatgagcaaatagataaagctaaaacagttcagattaaaccatttaataagatattttttaatgagatatttgataacctgttattagattgccaacgcttacctacacgagaatttaaaacgaatcccatattaagtcatgtatatcagtactttctatctcgctaccaaattcaacctaactctgatgttttctcaatcttgctaagcccattagaggcatcgagcttgctttcttgcactaccgatcaaatctatcgtttatatgaattaggttttcttaaattaggcgttaggccaaaactgcatcaaaaaatagcaagtcaccaatcagtttttacactctcaagtattattctagtcaaactttcaaacatgcaatccagtcaagatgaattgcatcactacctttcagcgtggtaactaatggaatttacagatattctcatcattcaagatgtaaaggaacgcaacagagctttcaaggttgcatttgctcactactcttcagctatttttattgatgatcatgaagtcgaagcgattacatgcctacttaatttgtgtacgccaaaaacggaggattacctagacaaaactagcgcatctctgtttttaaataatcatgataatattcaaaagtgtcttgacgaacttaagtggttccatagtcacaatgttaaatatccagattgccgagttaaggggcaaagcattatttctttaccaatcgattcagtaagtaacaccataaacagtaatgtagttccttatcgattaggttggtcccatgacagtggaaaggttaactatactcattttctactctcttgctttaaatggagaggagtacaaacaactcttagtcaattattcataaccgacacgctgttttggttagacatcataaaaaaaatacaatgtaactggaccaagaaacaaactgagcaatttattcattccatacaaaaagaaatgcctgcaaaaacacttccagaagatattagcccatactcaaaacagatcttattcccatataaaaatgactatctaactttaactcctgttacttctaactcaattcaaacatggttagaacaccaatctaggaaacctaatgatattcgctggattaaacgagaaagtaagcaccctgctagtgtaggcgctttatcatcttctatcggtggataccatagcttactatcttcgctaccaagcacatcacaatcaccacactcgtatcacgataatatgactagcaaaactgaatgtagagaggctttttgtgcttcagctatcactgagaaaagtacgactgacgcattacaaaggctcatcagttctgaagtaagaatgaatgtgaaacatagaaaacaaatcagaaaatcagggattcatttcattagacaaaaaatagctctttggcttactcctctgattcgatggagagatcatatagataataaccagatacaaatcactaatgaccatccatcattagttaacctattcttgtcgtctcctattgctaattttcccgatttattaacaccattgcataatcacctaaatcaaactctaggaaataataaatacacaaaacgctttgcttatcaccctgatttaatgcctattttcaaatcacaaatttcatggattctgaataaactaacacaagatgaaaatataaatcagcagcccgttttaactagaacccaatttatccatcttaaaaatttaaggctatacaatggcaatgcgttaagctccccctatgtttgtggactaccttcactaactggtttttgggggtttatgcatgacttcgagcgaagattaaaaacaaagattgaagaaaacattcattttgaggctttcagcctatttgttcatcaatatgaattacaatcatctcctccgctctgtgaggcttcggatgtttataaaaaaagagaactatcacctgcaaaacgtttattaacgcaaccttcttattcttgtgatatgcgttttgacctcattatcaaagttcacactgaggttaatttaagcgatattagtcaacgtatgcaatctgcaatgcctgctcgttgtgttggtggtacgttacatcaaccttcgttacatgagagcttagaatggcttagaacctatacatcgtctgagcatttatttgaagaattagcttgccttcctaactctggtcgctggatatacccaccatcggaaacatttaacactccagatgaatttctttctatattgggaaatagcacacaccttgctatttgtaatggttattcatttcttgaagatcctacatatagagagaatgtgagccttaatcaacacgtattttgtgaacctttaattggattagcagagcaagtaatacctatagatatgagacttaaccgacaaaaacattatttttcaaatgctttttggtcgatcaatagtgatttcaattctattcttatttcaaaagcatgagtaaggatacgctatgaagctttgtaataacctgaactacactcgatcattgtcaccgggaaaggctgttttttattatgaaagtaaagatggtcaaatgaatcctattaagtgtgagcaaactcatttaagagcgcctaaagctggattttcagaggcttttaatagcgattactcaactaaaaacactgctccacaagatctctcctttagtaaccctcaatttattgaagagtgttatgttcctgttggtattgatgaaatcaaaattcgattttcattacgtatagaagcaaattcattacaaccagataaatgctctgatattcaaattagagaaatattgcaagcattcgccactaaatataaagaaaatggcggctatcaagaacttggtgaacgatacgcaaaaaacttactttctggtacttggctatggcggaatgagcataatctaggtacaagtatttcaataaaaacaacaagtaaccaagaatttaatatcaataatgcctttaagctatcaagaaaaacctccgctaaagataaaaaaacaatatcaaagttaggaagtgaaatcgcaagtgcattatctgaccctgaccattattactttgccgatataacagcaacaatcaatgtggctttctgccaagaaatttatcctagccaagagtttttagacactaaagaaaaagggaagccaagcaaagtatatgcaaaaacgtcacttcaaactggtgaaaaaaccattgcttttcatgcacaaaagattggagctgcaattcaacttatcgacgattggtgggctgacgatgccgatattccattaagagtaaatgagtttggtgctgatcatcacaatgtcatagccagaaggcacccctcacatcgtaatgacttttataccttaattcaaaacgctgataactactgcgcgcaactgaatgaaaattcagatattactgatgatatgcattacgttatggctgtattagtaaaaggaggactgtttcaaaaaagtgcttcttcaaaaaaaggaaagtagatgctcactcactattttagtattacgtatgtgcctgatgattgtgataatgagttattggcaggacgttgcatcgctgaatttcacaagtttatctctagtctaaggctgatagaaaacaactcttttgccattggcttcccaaattggtctgaacaaagtattgggaatgaatttgctattttttctgataactctgaattattaagtgccattaagtaccagccctatttcaatttaatgaagagtgaggaattattttctattacagacatcaagcctgtgccaaataatcttcctcaaataagattcatcagaaaccagtctattgggaaaatatttataggttcaaaaaaacgtagaatccagcgttcaatcacaagaaataataaagagcatacacctatatcaaatgaggacagagagtttgataccttccacaaagtgtcgtgctctagtaaaagtaaacagcaacaatttatccttcatattcaaaaagacatcaccccgagaactacagactctaacgatagctacaatagttatggcttagcgacaaatagtaaacatttaggcactgttcctgatttatcaaaaatacctttttattgcgaggacaaattatcaaataaagatcaatgacctttaataaggagatatagcatgtacgttcgtacactaaaacaatctcaagtaaaaaacattagcaaatttatgagcctgaagaatgattcgatcattcgtacagaatctatgcttgaatttgatatgtgctttcatcttgaatattctcctgatgttgttagctttgaatctcaacctcaaggctttcattacgaatatcaaggaaaacgcctcccctatactccagattttctcattacacattcatctggacagcaacaattactcgaggttaaacctctttctaaaacccaatgtcctgattttcaatcaaaattcatccaaaaacagcaagcagcccagaaattaaatctttcattaatccttattaccgaaaagcaaattagaacaggtcatttactcaacaacttcaaacttctgcatagatatgctggcctacatagtatatcggccactcaaaaatcaatcattaacctcatccagacagtaaataaaattcaaattaatcaaattgcacacaggttaaatatcagtaatggagaggtattagctggtgttttaagttggctatcaaaagggacactgcaaacggtttacacaaatgaaatgattaatggcaactctattgtatcgttaggtttatcaatggatatagaatttccatttactgatgaatttcaaaaaatattaactactcaatcctatccagctgaaatcactaatgataaaaaaacagaagtgcttacgccttctcttgattcatacgatgacgctataaaagcagaagtattgcgtcgtatttcttttcttaggtggataaagcctcgtttaaaaggtggatggacagaaaaaaatttaacacctcttcttaacgatgctgaaattgatttaaaagtgagcgcaccaaaatggcgaacccttgctgaatggcataagaattatcacaaaagtggggaaaaggtatcctctttaattccaaagcactcacataaaggtaataaaaatatgaatactgatagcgattttttgataacaaaagcaattaacgaaaaatatttaacactaaaccgatgctctatcagtcaaacttttaagtactattgtgatttagtaataattgaaaatcgctctatacctacaaagaaaataaaactggtcagtcaacgtactttttataaccgaatcaatgcactacctaaatatgatgtcgctttaaagcgttacggaaaacgatatgctgatattaattaccgcaccgtagataaaatgataacagcaacaaggcctttagaacgagtagaaatagaccacacgcctcttgacttaatcttgctcgatgacactttagagataccattaggtcgcccatacttaacaattttaatagatagctatagtaaatgcatcgtgggctacaatcttagcttcaggcctcctagctttgaatctattcgccatgctttttgtaatgcatgccttgataaatctttaattacacagcaatatcctcaccttcaacacgattggcctgttgcaggaaaaattgaaaatcttgttgttgataatggcgctgagttctggagtaatagcttagaagatagtttactgccttttgctaccaatattttatataacaaggttggtgaaccgtggatgaaacctcttgttgaaaagttttttgacctgttaaataaaggcttagtccattccctcccaggaacaactcgctcaagaatagagcaactgaaaggttataatcctaaaaaagatgcagcgattacattcagtttatttttagaactatttcatacgtggattatcgacatctatcacatgacttccgatacaagagagactgctgttccttattttaaatggcaagaaggagtaacggctttaccccctctcacctatacagatgaagaggctcaacaattacgaatagagcttggaatattaaatactcgaacggttcgtcttggaggtatttttcttcatggattacgttatgaatcagaagagttaagtgaatacagaaaaatttggggggctattgataagaataacctaacgctgaaaacaaaaaccgacccttcagatatatcacatatttttgtctatttaactaatgaatcacgctatattaaagttccttgcataacagatattagttatacatccggacttacgttatttcagcatcaaaccgctcaaaaattgcaaagaactaaaacaagattacaaatagatcatgaaaaactcgctgattcacgtatgtatgttgaaaatagaattgcggaagaagtggagaaaatcaaatctaataaaaaacgtactgcgaaaactacccatgcatcaaagatcgctcgacaccaagatattggtagtcatactcaaaagtcgattcaagtacctaatgagcaaagtgaaatcaaaaaactgaataaaaatgaacatgatgttttaaatggatgggatgaacaacatgatgatttagagggattctgatgcacactttatcttcgactcaaaaagagcaactcatcagctttaatcaatgctttattgagtatccaataattactcatatctactctatttttaatgatttacgaatgaatcaaggtttaggtgcagaaccacaatgtatgctcttacttggtgatactggctcaggaaaatcagcactcattaataactatctgttacgacaaccgccatcaaatttttccgcactcagttcattacccgttttacatacacgtatcccacgtagagtgaataacgaacaaaccatgtatcaactgttaactgacttaggacaatcaccttcaggatcgagacgtgcaaaacgctcagaaatcgctctcgccgaaggagtcgttcgagctttaaagcgtaaaaaaacagaactcattattattaatgagttccaagaactcatcgaattttcaagtgctaaagaacgtcagaatgtcgctaacacgcttaaatacattagtgaagaagctagagtatctattgtgttagttggtatgccctatgcagatattattgctgaggagcctcaatggggatctcgcttaacatggaaaacacaaatcgaatatttttcattaaaaaatgacatgaaaacctatgttcaattcctaaaaggcctagcaaatcgaatgggatatgatgaggtgccatcattgcatagcaaggagcttgctattccactgttttcaatttgtaggggtgagctaaggcaacttaaaaacttctgctctgatgcgatgctagagagctttaagcaaaacaaaaacacactaactcatgatgtattaagtgccactttcaagtacaaattcccaacgaagaaaaatccatttgaaatgaatgtagctgacgttccaattcaagaggtagagtcttattcaaagtataatctaaacgcaatgactgatgatgaacgtcttactgcaactaagtttcttgatgctatgtctttatcttcactgttgagtaagacttgacctaggctgctgccaccgctgagcaataactagcataaccccttggggcctctaaacgggtcttgaggggttttttgctgaaacctcaggcatttgagaagcacacggtcacactgcttccggtagtcaataaacgaggaagcggaagagcgatgtggctggggcttccacccaactgatgcttgcaaaattactctgcataaattgcaaagaagtctacaaatttgcaaaataagcctgcataaactacctttagttgtaagtttacaacatagaggtgaatatcatgtacgttcgtacactaaaacaatctcaagtaaaaaacattagcaaatttatgagcctgaagaatgattcgatcattcgtacagaatctatgcttgaatttgatatgtgctttcatcttgaatattctcctgatgttgtacgcccctatccattttagcggatcctactaggagcacgtgttgacaattaatcatcggcatagtatatcggcatagtataatacgacaaggtgaggaactaaaccatgaacatcaaaaagtttgcaaaacaagcaacagtattaacctttactaccgcactgctggcaggaggcgcaactcaagcgtttgcgaaagaaacgaaccaaaagccatataaggaaacatacggcatttcccatattacacgccatgatatgctgcaaatccctgaacagcaaaaaaatgaaaaatataaagttcctgagttcgattcgtccacaattaaaaatatctcttctgcaaaaggcctggacgtttgggacagctggccattacaaaacactgacggcactgtcgcaaactatcacggctaccacatcgtctttgcattagccggagatcctaaaaatgcggatgacacatcgatttacatgttctatcaaaaagtcggcgaaacttctattgacagctggaaaaacgctggccgcgtctttaaagacagcgacaaattcgatgcaaatgattctatcctaaaagaccaaacacaagaatggtcaggttcagccacatttacatctgacggaaaaatccgtttattctacactgatttctccggtaaacattacggcaaacaaacactgacaactgcacaagttaacgtatcagcatcagacagctctttgaacatcaacggtgtagaggattataaatcaatctttgacggtgacggaaaaacgtatcaaaatgtacagcagttcatcgatgaaggcaactacagctcaggcgacaaccatacgctgagagatcctcactacgtagaagataaaggccacaaatacttagtatttgaagcaaacactggaactgaagatggctaccaaggcgaagaatctttatttaacaaagcatactatggcaaaagcacatcattcttccgtcaagaaagtcaaaaacttctgcaaagcgataaaaaacgcacggctgagttagcaaacggcgctctcggtatgattgagctaaacgatgattacacactgaaaaaagtgatgaaaccgctgattgcatctaacacagtaacagatgaaattgaacgcgcgaacgtctttaaaatgaacggcaaatggtacctgttcactgactcccgcggatcaaaaatgacgattgacggcattacgtctaacgatatttacatgcttggttatgtttctaattctttaactggcccatacaagccgctgaacaaaactggccttgtgttaaaaatggatcttgatcctaacgatgtaacctttacttactcacacttcgctgtacctcaagcgaaaggaaacaatgtcgtgattacaagctatatgacaaacagaggattctacgcagacaaacaatcaacgtttgcgcctagcttcctgctgaacatcaaaggcaagaaaacatctgttgtcaaagacagcatccttgaacaaggacaattaacagttaacaaataaggaggacaatcatggagaaaaaaatcactggatataccaccgttgatatatcccaatggcatcgtaaagaacattttgaggcatttcagtcagttgctcaatgtacctataaccagaccgttcagctggatattacggcctttttaaagaccgtaaagaaaaataagcacaagttttatccggcctttattcacattcttgcccgcctgatgaatgctcatccggaattccgtatggcaatgaaagacggtgagctggtgatatgggatagtgttcacccttgttacaccgttttccatgagcaaactgaaacgttttcatcgctctggagtgaataccacgacgatttccggcagtttctacacatatattcgcaagatgtggcgtgttacggtgaaaacctggcctatttccctaaagggtttattgagaatatgtttttcgtctcagccaatccctgggtgagtttcaccagttttgatttaaacgtggccaatatggacaacttcttcgcccccgttttcaccgtgggcaaatattatacgcaaggcgacaaggtgctgatgccgctggcgattcaggttcatcatgccgtctgtgatggcttccatgtcggcagaatgcttaatgaattacaacagtactgcgatgagtggcagggcggggcgtaatcgcgatatcagcacacaattgcccattatacgcgcgtataatggactattgtgtgctgataggatcctcatctgttacgccggcggtagccggccagcctcgcagagcaggattcccgttgagcaccgccaggtgcgaataagggacagtgaagaaggaacacccgctcgcgggtgggcctacttcacctatcctgcccggctgacgccgttggatacaccaaggaaagtctacacgaaccctttggcaaaatcctgtatatcgtgcgaaaaaggatggatataccgaaaaaatcgctataatgaccccgaagcagggttatgcagcggaaaagcgctctttgttgatacaaccataaaatgataattacacccataaattgataattatcacacccataaattgatattgcctcttcatggtctaaacttcagtaagtttacgacattttcctcgaggtcatttccggggatccgcgatcgcttctccttacgcatctgtgcggtatttcaggtaccgagacgggtttaaggaggaagattttatgatacaaaagttatctgtatttatctaatttaagtggctactctaagaaggttctgtccaaaaaaaagttacatttattaataacacatgaaattaaattacatactaaaattacagtcatattttaaggtaaaacattttgcagactatcactgcaaaaccatgtgatcttatgttgcaaattcaaaactaagcttttgatttttatatgagagctatgcaagcttatgttgcaagcatcaccaactgatgcttgcaaaatcactcgacgtcaggtggcacttttcccggtaaaccagcaatagacataagcggctatttaacgaccctgccctgaaccgacgaccgggtcatcgtggccggatcttgcggcccctcggcttgaacgaattgttagacattatttgccgactaccttggtgatctcgcctttcacgtagtggacaaattcttccaactgatctgcgcgcgaggccaagcgatcttcttcttgtccaagataagcctgtctagcttcaagtatgacgggctgatactgggccggcaggcgctccattgcccagtcggcagcgacatccttcggcgcgattttgccggttactgcgctgtaccaaatgcgggacaacgtaagcactacatttcgctcatcgccagcccagtcgggcggcgagttccatagcgttaaggtttcatttagcgcctcaaatagatcctgttcaggaaccggatcaaagagttcctccgccgctggacctaccaaggcaacgctatgttctcttgcttttgtcagcaagatagccagatcaatgtcgatcgtggctggctcgaagatacctgcaagaatgtcattgcgctgccattctccaaattgcagttcgcgcttagctggataacgccacggaatgatgtcgtcgtgcacaacaatggtgacttctacagcgcggagaatctcgctctctccaggggaagccgaagtttccaaaaggtcgttgatcaaagctcgccgcgttgtttcatcaagccttacggtcaccgtaaccagcaaatcaatatcactgtgtggcttcaggccgccatccactgcggagccgtacaaatgtacggccagcaacgtcggttcgagatggcgctcgatgacgccaactacctctgatagttgagtcgatacttcggcgatcaccgcttccctcatactcttcctttttcaatattattgaagcatttatcagggttattgtctcatgagcggatacatatttgaatgtatttagaaaaataaacaaa

SEQ ID NO: 36 - DNA, 16142 bp, synthetic construct
  source 1..16142: mol_type = other DNA
tagctagctcactcggtcgctacgctccgggcgtgagactgcggcgggcgctgcggacacatacaaagttacccacagattccgtggataagcaggggactaacatgtgaggcaaaacagcagggccgcgccggtggcgtttttccataggctccgccctcctgccagagttcacataaacagacgcttttccggtgcatctgtgggagccgtgaggctcaaccatgaatctgacagtacgggcgaaacccgacaggacttaaagatccccaccgtttccggcgggtcgctccctcttgcgctctcctgttccgaccctgccgtttaccggatacctgttccgcctttctcccttacgggaagtgtggcgctttctcatagctcacacactggtatctcggctcggtgtaggtcgttcgctccaagctgggctgtaagcaagaactccccgttcagcccgactgctgcgccttatccggtaactgttcacttgagtccaacccggaaaagcacggtaaaacgccactggcagcagccattggtaactgggagttcgcagaggatttgtttagctaaacacgcggttgctcttgaagtgtgcgccaaagtccggctacactggaaggacagatttggttgctgtgctctgcgaaagccagttaccacggttaagcagttccccaactgacttaaccttcgatcaaaccacctccccaggtggttttttcgtttacagggcaaaagattacgcgcagaaaaaaaggatctcaagaagatcctttgatcttttctactgaaccgctctagatttcagtgcaatttatctcttcaaatgtagcacctgaagtcagccccatacgatataagttgtaattctcatgttagtcatgccccgcgcccaccggaaggagctgactgggttgaaggctctcaagggcatcggtcgagatcccggtgcctaatgagtgagctaacttacattaattgcgttgcgctcactgcccgctttccagtcgggaaacctgtcgtgccagctgcattaatgaatcggccaacgcgcggggagaggcggtttgcgtattgggcgccagggtggtttttcttttcaccagtgagacgggcaacagctgattgcccttcaccgcctggccctgagagagttgcagcaagcggtccacgctggtttgccccagcaggcgaaaatcctgtttgatggtggttaacggcgggatataacatgagctgtcttcggtatcgtcgtatcccactaccgagatgtccgcaccaacgcgcagcccggactcggtaatggcgcgcattgcgcccagcgccatctgatcgttggcaaccagcatcgcagtgggaacgatgccctcattcagcatttgcatggtttgttgaaaaccggacatggcactccagtcgccttcccgttccgctatcggctgaatttgattgcgagtgagatatttatgccagccagccagacgcagacgcgccgagacagaacttaatgggcccgctaacagcgcgatttgctggtgacccaatgcgaccagatgctccacgcccagtcgcgtaccgtcttcatgggagaaaataatactgttgatgggtgtctggtcagagacatcaagaaataacgccggaacattagtgcaggcagcttccacagcaatggcatcctggtcatccagcggatagttaatgatcagcccactgacgcgttgcgcgagaagattgtgcaccgccgctttacaggcttcgacgccgcttcgttctaccatcgacaccaccacgctggcacccagttgatcggcgcgagatttaatcgccgcgacaatttgcgacggcgcgtgcagggccagactggaggtggcaacgccaatcagcaacgactgtttgcccgccagttgttgtgccacgcggttgggaatgtaattcagctccgccatcgccgcttccactttttcccgcgttttcgcagaaacgtggctggcctggttcaccacgcgggaaacggtctgataagagacaccggcatactctgcgacatcgtataacgttactggtttcacattcaccaccctgaattgactctcttccgggcgctatcatgccataccgcgaaaggttttgcgccattcgatggtgtccaaataaaacgaaaggctcagtcgaaagactgggcctttcgttttatctgttgtttgtcggtgaacgctctcctgagtaggacaaatgcggccgctaatgtgagttagctcactcattaggcaccccaggctttacactttatgcttccggctcgtatgttgtgtggaattgtgagcggataacaaactagtgtgaactgccgagtaggtagctggaaatgagacctctgtcttgtcagctagggtggtctcgtgaactgccgagtaggtagctggaaattagccaattggaattccgagcgaaggagatatacatatgcattttttagttcaaacaaaactttatcctgatgaggctcttgaaagctatttgctaaggcttgctagggataactcatacgatggctatagtgagcttgctgatattttatggcaatggcttgtagagcaagatcatgatcttgaaggtgcgttgccgttagagctgggtaaagttgatgtttatcatgctaggcaagcgagtagctttagaataagagcgctcaagttggtagctcaattagctgatgtaaacgctggtaatattcttgcgcttgcatggcggcgcagtaattttaaatttggcaacttagtagcagtaagccgtaatgagcagacaattcctcttgagttacttcgcactgataatatacctgtttgcattgaatgcttgtttgaatcttcttacgttccttttcattggcatttaaagccctataagacgtgccataagcataaatcacaattaactacacattgtaaggaatgccataacttaattgattacagagcttctgaggagtttttagagtgcagttgtggttgtaaactaaccaatagtgaacagttaaacgatgcagactttaaaattgcatttgcgcttgcaagtagtaacagccataaaatagtggggttaatatcttggtttgcgaaggttaagcaacttgatgtaagcgatgctgactttaaccgtacttttgttgattactttagtacttggcctgaaagccttactactgaattagatttactcacaaacaatgcgcgcctcaagcaacttaacccttttaataaaactaagttcaactctgtttatggaaatgtgatccgtgatggtcaaatagctgcaacaagtaaccgtaaaaacaaagtacttgatgaactaattaaatattttgttgaattagttgatagtaatcctaaaactaaacatccaaatattgcagatttactgctttgtacttttgataccgcagtattattaaacaccaccacagagcaagtttataggcttcatcaagaaggctttttaaactgcgcttacccacaaaaaaagcacgaacagctcagagctgatagtcatgttttttatttacgccaagtgattgagctacagcaagcattcgcagctgaaacgcctcaaacaaaaaaacaatttatagcgccgtggtaacttatgaacttacaagatgcatttgcgattgaatcacttaaggaaaaaaccacagcacttagaaagttgtttactccatatatgtctcatgttgcggtagatggctttgaagaacaagcgctgactgtgctcattaacctagtttataaacgaagtgagattgatgatttaacaagtacaagaaccgctaaaagtgtattacgtgatgaagtgttactgagtaaatgtattaacgaagttaaatggtttcatactcataatttaaaatatcctgatatacgcgtaagccatcaacgtttaattagtaaggtagtaagtgaagatattgcgggtatttgtagccggtcattacctttaagttttggatggtcgcacaacagtgctgaaattaatcatgcaaagttatttttaacctcatttacttggcaaggtgaagtaacttgtttagcaaatttactaataaatgaggagcctgtttggattaatttaataaggacatacgggtttactaaaaaggcggttttaggcatcgcgggtaaaataaaacagcttttgccagtggcagaactcccattagaagtaagctctttttcaccacaattacaaatgccatttcagcaaagctaccttgcggttacgcctgtagtaagtcacgcaatgctggctaaaattcagcaattaacaacagatcgtaagttaaattttggtttagttgagcactcaagacctgccaatgttggcgatttagcaagctcagtaggtggtaatattagagtgctgcgttactttcctaaaacatattcaaaggctgttaactgctctgaagtattcaataatgatagtgagaaagcatttaaaattcgtgcgctattaaacagtcaatttcaacaggcgcttttggtattggtcggtattaaacagtttaatacgttaaggcaaaagcgattagcgcgagtagcggctattaggcaagtacgtgttagcttgcagttgtggctggataacattctggaagctaaaaataacgctcaagggcaagcctaccctgagtgggcaaagcattacttagatcagagtattactaactgcattagccaatttagtaacgtactaaatgagagccttggtaatttaagtaagctcaaacgctttgcgtatcaccctaatttaatgggggtgtttaaaacgcagttaaactatgtgtttactcactgtattcctgatgaagaaacattaaatgatgagcaaatagtgtatgtgcattgccaagatatgcgagtgtttgatgctgaggcaatggctaatccgtatattcaaggtatgccgtcacttacagctttaaatgggcttgctcataactttgagcgtaagctaaaaaattttatagacccttcaattaagtgtattggtagtgccattaacattgaaagttatcaactacatacaggtaaaccattacctgaaccaagtaagttaaaacaagttgctggccgtagtcatgtcataagatcaggaattatcgataaacctaaatgcgatataacactcgatttagtctttaggctttttgtaccaaacattaagctgttagataagttaaatagtcagcttgtgaaacccgcactaccatctatgtttgcaggcgggactatgcatccaccttcgttataccaaaatattgactggtgccatttacatactaaaccaagtgagctgtttaaaaatataaaggcaaaatcgttaaatggcagttggttgtacccttcaaaaaaagtagtcaaaagttttgaacagttgattgatgcgcttaacggtaactttaatttaagacctgctgccattggttttgctgcgcttgaagaacccataaagcgagatgtagccttacatgaataccattgttatgctgagcccgtaattgggcttttagagtgtgttagcaatacatcagttaagtacgcaggggctaagcagttcttccatgacgcattttgggttatggatgttcaaaaagagtctatgcttatgaaaaagtctaagtttgagtatgaataatgcaattacctcggcatttaagttacacgcgttcgctttcacccagtaaagcggtatttttttataaaacatcggagtctgattttgaaccgctgcaaatagagcaaaataagcttgttgggcaaaagtcagggtttggcgatgcgtatcaaaagcaaaatgtggctaaaaatttagcgccacaagatctagcgtttggaaacccacaaacgattgatgtgtgctacgtacctccagcagtaaatgagctattttgccgtttttcactcagggttgaggctaatagcaatgaaccacacgtttgtgatgaccctaaagttatttattggttaaaacggttttttgaaacctacaaaaaacacaatggtcttaatgaagttgcaactcgctatgctaaaaatatactgatggggaactggctttggcgtaaccgccaatcaccaaatgttgatattgaaatccttactgaacatgcagccccgatcattgttgaaggtgcacaaaaactaaaatggcaaggcaactggcaaaacaatcaaacagcattaataacattatcagaagctattcaagaagggcttagcaatcctcaaaattattgttatttagatataaccgcaaaaattaaaaatgcatttagccaagaggttcaccctagtcaaaagtttgtagacaatgttgaacaaggcatgtcatctaaacaacttgcatacactcaagtcggcgataaaaaagcagccagtttaaactcacaaaaagtaggggctgcgattcaaactattgatgattggtatgagggaggttacaaacctttacgcactcacgagtatggtgcagataagcaaatattagttgcacatagaacgcctaagagccattcagacttttattcattacttccgcgcattgccttgcatattaagcacatggaaaagcatggtttagagcaaagtgaagaatcaaacgcagttcactttattgcagcagtgttgatcaaaggcggcttgttccaaaggagtaaggcatgaagcgctattattttactattacttatttacctaaaaattgtgatgtaagcctccttgcagggcgttgtatcggcatattgcatgggtttatgagttcgcgtgaaattagtaatataggtgtgtgttttcctaaatggaatgagcaagagataggtaatgaattggcgtttgtatcgacagataaaaagcaattaaccaatctatctcagcaaagctattttgagatgatggctcaggataaattatttggcttatcaaaaatactcgaagtaccaacaaaccaaaatgaggttatgtttattcgcaaccaatcagtagctaaggcttttgttggcgaaaagcaaagacgtttaaaacgcgctaaaaaacgagctgaagccagaggtgaagtttataatcctgaatatcaatttgaggcaaaagacataggccattttcattcaatacctgtatcaagcaaagccaacggccaaagttatgttctgcatatacaaaaaattgaaaatactaatgcgacagaaaatcaatttaataattatggctttgctacaaatcaaacatttcaaggtacggttccttctttgaatacccaataacctttaataaggagatatagcatgtacagaagaaaactcaaacactcccgtgttaaaaaccttcataaatttgctagtcaaaaaaataaatctacctgtttagttgaatcctctttagagtttgatgcctgttttcattttgaattttcaccatcaatagccgcatttgaggcacaaccactaggttatgaatatgagtttgataaccgtatttgccgttacacacctgactttttacttacccacacagacggcacgcaaaaatttatagaagtaaaaccgcaaagcaaaattgctgacgaggactttcgtgcacgttttattgaaaagcaaaccatcgctaaacaagatggacgcgacttaatactggttactgataaacaaatccgtgtatacccaacactcaataacttaaaacttttacatcgctattctggttttcagtctttaacagagctgcaagcatcggtgctcgagcttgttaagcaatacggctctattaaagtgggccagttagttaactttttaaaagtaactgccggtgagctacttgctactgtgctacgcttattatcactagggcagttatttgccgacttaactacaaatgaaatatcaatagaaacagcaatttggtctaacaatgtttaatgacggtttgtttgatgatgagtttaaccagccattaccaaaagtagaaaccaaactacctcaaaattacgccaaagatttacaagcccttcctgaaaaaattaaaaatacaacatttgctaaacttaaatatattcaatggcttgaggctaatattcaaggtggctggacacaaaaaaaccttgagcctttattgaaagtaatgcctgaagttgagggtgaaaaaaagcctagctggagaacagctgcacgatggtatagcgcttatacaaatgcagataaaaatatcatggcgctaataccaagccatcaaaaaaagggtaacagggagcgcgatacagccaccgataagttttttgaaaaagcacttgagcgttacttagtaaaagaaaagccatcagtggcttctgcttacaagtattacgcagacttagttatcattgaaaacgacagcgttgtgggcagtgttttaaagcctttaacatacaaagcgtttaaaaatagaatcgataatttaccgcaatacgacgtgatggtttctcgctatggtaagcgtcttgctgatattgcttttaataaagtagaagggcatacacggcctacccgagtactcgaaaaagttgaaattgaccatacaccgcttgatcttattttattagatgatgagctacatatcccgcttggtaggccaacacttaccatgttagtcgatgtgtatagccattgtattgttggcttctactttagcttcagcgagcctagctatgatgcagtaaggcgagcaatgctaaatgcaatgaaacctaaaagtgatgtggcaaaactatacccagatacgataaatgagtggaaatgtgctggcaaaattgaaactctcgttgttgataatggcgctgaattttggagtaacagccttgaacttgcttgtgaagaaattggtattaatactcaatataaccctgttgcaaagccgtggttaaaaccctttgtagaacgtatgtttggcacaattaacactgaattattagaccctgttcctggtaaaaccttttctaacattttacaaaagcatgaatacaatcccaaaaaagatgcaatcatgcgctttacaacctttatgcagctattccataaatgggtagtagacgtttaccatcaagatgccgatagccgctttaagtacatacctagccaactatgggagcaaggctttaatacgttaccgccaacagtgctgagtaatgctgatcttcaacaattagatgttgtgctcagtatttcaaaccatagggtgcttcgtaaaggtggaatacggctagaaaatttaagctacgacagtactgaactagccaactatagaaaacagtttagccataaagtatctcaagaagttttaattaaattaaaccccgatgatatttcttatatatatgtttacctcgataagctagagcattacataaaagtgccatgcatagatccaaacggttacacccaaaatttaagtttgaatcagcataaaataaatatacgtattcatcgcgattttatttccggatctatcgataatgtaggcttagcaaaagcgcgtatgtttattcataataaaattcaaaacgagtttgaagagttaaaaaatgcaccaaaacactcaaaagtaaaagggggtaaagcattagctaagcatcaaaatgtaagtagtgactcacaaaaatcaatagctcagagcgagccattagaacccaaaaaggttacacctaaagagcaaccaacagatagctgggatgactttatttcagacctagatggattttaattatgctgaccgataaacaaaaagcaaaacttaatgaatttcgcgatgtatttattgaatacccaataataactactgtatttaacgactttgacagattaagacttggtaaaggattagcgggcgaaaagccctgcatgctgttaaatggcgatacaggcacaggtaaaacagcactaataaaacagtataaagaacgccatttaccgcaatttattaatggagtgatgaaccaccctgtattagtaagccgcatacctagtaacccgacactagaatctactttagccgagcttcttaaagacttagggcaagtaggtagtacagagcgcaagctgagaataaacggtacgcggttaacgacatcattaataaaatgcctaaaaacgtgtggcacagagcttataattattgatgagtttcaagagctgattgagcacaaccaaggtaaaaagcgccgcgagattgctaatcgattaaaatacattaacgatgaagcgggtgtatcgattgtattggtgggtatgccgtgggcagaaaaaatagcagacgaaccccagtggtcatcgcgtttattagtaaggcggcagctgccttattttaaattatcagaaaacccaaagcattttgtacagttaataattggcctagctaaccgtatgccattcaccgaaaagccaaaattaagtgagcaagcaacagtatttgctttgttctcattgtcaaaaggctgttttagaactcttaaatactttttagatgatgccgtactttatgcattaatggataacgcgaaaaccctcacaaccaagcatctagttaaagcatttggagtactgtttcctgatgtaccaaacctatttaccttgcccgttgcagaaattacagcaagtgaagttgagcgctattcactttataaacttgaaagcgcccaagatgaagatccgtttatagcgactaagtttactgaccaaatgccgattagtcagttgttgaggaagtaacctaggctgctgccaccgctgagcaataactagcataaccccttggggcctctaaacgggtcttgaggggttttttgctgaaacctcaggcatttgagaagcacacggtcacactgcttccggtagtcaataaacgaggaagcggaagagcactgccacccaaattcctcatttggtgttgtttgaagtataagttgacatatttgtactaaaagatggcataaattggaagtataaggtggcatagtctagtatttaaccaaatggttagatggttgactcacatgtacagaagaaaactcaaacactcccgtgttaaaaaccttcataaatttgctagtcaaaaaaataaatctacctgtttagttgaatcctctttagagtttgatgcctgttttcattttgaattttcaccatcaatagccgattagacggacgcaatcttgggatccgagccccaactggggtaacctttgagttctctcagttgggggagcacgtgttgacaattaatcatcggcatagtatatcggcatagtataatacgacaaggtgaggaactaaaccatgtcacatctcgcagaactggttgccagtgcgaaggcggccattagccaggcgtcagatgttgccgcgttagataatgtgcgcgtcgaatatttgggtaaaaaagggcacttaacccttcagatgacgaccctgcgtgagctgccgccagaagagcgtccggcagctggtgcggttatcaacgaagcgaaagagcaggttcagcaggcgctgaatgcgcgtaaagcggaactggaaagcgctgcactgaatgcgcgtctggcggcggaaacgattgatgtctctctgccaggtcgtcgcattgaaaacggcggtctgcatccggttacccgtaccatcgaccgtatcgaaagtttcttcggtgagcttggctttaccgtggcaaccgggccggaaatcgaagacgattatcataacttcgatgctctgaacattcctggtcaccacccggcgcgcgctgaccacgacactttctggtttgacactacccgcctgctgcgtacccagacctctggcgtacagatccgcaccatgaaagcccagcagccaccgattcgtatcatcgcgcctggccgtgtttatcgtaacgactacgaccagactcacacgccgatgttccatcagatggaaggtctgattgttgataccaacatcagctttaccaacctgaaaggcacgctgcacgacttcctgcgtaacttctttgaggaagatttgcagattcgcttccgtccttcctacttcccgtttgccgaaccttctgcagaagtggacgtcatgggtaaaaacggtaaatggctggaagtgctgggctgcgggatggtgcatccgaacgtgttgcgtaacgttggcatcgacccggaagtttactctggtttcggcttcgggatggggatggagcgtctgactatgttgcgttacggcgtcaccgacctgcgttcattcttcgaaaacgatctgcgtttcctcaaacagtttaaataaggaggacaatcatgaaaaagcctgaactcaccgcgacgtctgtcgagaagtttctgatcgaaaagttcgacagcgtctccgacctgatgcagctctcggagggcgaagaatctcgtgctttcagcttcgatgtaggagggcgtggatatgtcctgcgggtaaatagctgcgccgatggtttctacaaagatcgttatgtttatcggcactttgcatcggccgcgctcccgattccggaagtgcttgacattggggaattcagcgagagcctgacctattgcatctcccgccgtgcacagggtgtcacgttgcaagacctgcctgaaaccgaactgcccgctgttctgcagccggtcgcggaggccatggatgcgatcgctgcggccgatcttagccagacgagcgggttcggcccattcggaccgcaaggaatcggtcaatacactacatggcgtgatttcatatgcgcgattgctgatccccatgtgtatcactggcaaactgtgatggacgacaccgtcagtgcgtccgtcgcgcaggctctcgatgagctgatgctttgggccgaggactgccccgaagtccggcacctcgtgcacgcggatttcggctccaacaatgtcctgacggacaatggccgcataacagcggtcattgactggagcgaggcgatgttcggggattcccaatacgaggtcgccaacatcttcttctggaggccgtggttggcttgtatggagcagcagacgcgctacttcgagcggaggcatccggagcttgcaggatcgccgcggctccgggcgtatatgctccgcattggtcttgaccaactctatcagagcttggttgacggcaatttcgatgatgcagcttgggcgcagggtcgatgcgacgcaatcgtccgatccggagccgggactgtcgggcgtacacaaatcgcccgcagaagcgcggccgtctggaccgatggctgtgtagaagtacttgccgatagtggaaaccgacgccccagcactcgtccgagggcaaaggaataacctaggctcgagtaatggtttcttagacgtcttgacagctagctcagtcctaggtataatgctagcctgtcaccggatgtgctttccggtctgatgagtccgtgaggacgaaacagcctctacaaataattttgtttaatactagagaaagaggggaaatactagatggtgtcgaaaggtgaggagcttttcacgggggtggttccaatcttagtcgagcttgatggtgacgtgaatggccataagtttagcgtgcgcggcgagggtgagggcgatgcgacgaacggtaaacttactttaaagtttatttgtactacaggcaaattaccggtcccgtggccgaccctggtcactacgcttgggtatggggtagcatgttttgcccgttaccctgaccacatgaaacagcacgatttctttaaatctgccatgcccgaagggtatgttcaggagcgcactatcagttttaaagacgacggaacgtacaaaactcgtgctgaagtaaagttcgaaggtgatacccttgtgaaccgtatcgtccttaaaggcatcgacttcaaagaggacggtaacattttaggccacaaattagagtacaacttcaattcacataaggtttatatcacagcagataagcaaaaaaatggcatcaaggcaaattttaagacccgccacaacgtagaagatggtggagtccagttggcggaccactaccagcaaaatacaccgattggcgatggtccggttttgcttcccgacaatcactatcttagccaccagagtaaactgagtaaggacccaaatgaaaagcgcgaccacatggtattgaaagagcgcgttacagcagctggaattacacacgatatggacgaactttataagtaatagggataacagggtaatcgcaaaaaaccccgcttcggcggggttttttcgcgtttaaacgtgccagggcgtgcccttgggctccccgggcgcgttttttacgcgttctagagtccttactgcagtagttttgctgaaatactcgattcacaaaaatatcaacttatggttgttttgtgagatatcaatatatggttgttttgtggttaagttgctgattataaataattattaaatatcactttatggttgcatcaacaggtaccgagctctcatctgttacgctcggcgtgtagccggccagcctcgcagagcaggattcccgttgagcaccgccaggtgcgaataagggacagtgaagaaggaacacccgctcgcgggtgggcctacttcacctatcctgcccggctgatcgccgttggatacaccaaggaaagtctacacgaaccctttggcaaaatcctgtatatcgtgcgaaaaaggatggatataccgaaaaaatcgctataatgaccccgaagcagggttatgcagcggaaaagcgcttatcagcggtaccggtagctcggctgtgaatgaaatggacttaccaattaaagtaaaaggtgatgatttattcatcaaagtttttgtgccagtgtaaaccattttccaaactgtttaagagtgatttacaacgcgtagcatgtttactttgcgttttataaagctgtatttggtagctttatgccatctattgcttcaatactatgccaatatacacttcacttaccacgctgtaagttaataaaaccgagtttggttatgtcaacttatacttcaaacaacatttgggtgaaaatacattcctttttgacgtcaggtggcacttttcccggtaaaccagcaatagacataagcggctatttaacgaccctgccctgaaccgacgaccgggtcatcgtggccggatcttgcggcccctcggcttgaacgaattgttagacattatttgccgactaccttggtgatctcgcctttcacgtagtggacaaattcttccaactgatctgcgcgcgaggccaagcgatcttcttcttgtccaagataagcctgtctagcttcaagtatgacgggctgatactgggccggcaggcgctccattgcccagtcggcagcgacatccttcggcgcgattttgccggttactgcgctgtaccaaatgcgggacaacgtaagcactacatttcgctcatcgccagcccagtcgggcggcgagttccatagcgttaaggtttcatttagcgcctcaaatagatcctgttcaggaaccggatcaaagagttcctccgccgctggacctaccaaggcaacgctatgttctcttgcttttgtcagcaagatagccagatcaatgtcgatcgtggctggctcgaagatacctgcaagaatgtcattgcgctgccattctccaaattgcagttcgcgcttagctggataacgccacggaatgatgtcgtcgtgcacaacaatggtgacttctacagcgcggagaatctcgctctctccaggggaagccgaagtttccaaaaggtcgttgatcaaagctcgccgcgttgtttcatcaagccttacggtcaccgtaaccagcaaatcaatatcactgtgtggcttcaggccgccatccactgcggagccgtacaaatgtacggccagcaacgtcggttcgagatggcgctcgatgacgccaactacctctgatagttgagtcgatacttcggcgatcaccgcttccctcatactcttcctttttcaatattattgaagcatttatcagggttattgtctcatgagcggatacatatttgaatgtatttagaaaaataaacaaa

SEQ ID NO: 37 - DNA, 15412 bp, synthetic construct
  source 1..15412: mol_type = other DNA
tagctagctcactcggtcgctacgctccgggcgtgagactgcggcgggcgctgcggacacatacaaagttacccacagattccgtggataagcaggggactaacatgtgaggcaaaacagcagggccgcgccggtggcgtttttccataggctccgccctcctgccagagttcacataaacagacgcttttccggtgcatctgtgggagccgtgaggctcaaccatgaatctgacagtacgggcgaaacccgacaggacttaaagatccccaccgtttccggcgggtcgctccctcttgcgctctcctgttccgaccctgccgtttaccggatacctgttccgcctttctcccttacgggaagtgtggcgctttctcatagctcacacactggtatctcggctcggtgtaggtcgttcgctccaagctgggctgtaagcaagaactccccgttcagcccgactgctgcgccttatccggtaactgttcacttgagtccaacccggaaaagcacggtaaaacgccactggcagcagccattggtaactgggagttcgcagaggatttgtttagctaaacacgcggttgctcttgaagtgtgcgccaaagtccggctacactggaaggacagatttggttgctgtgctctgcgaaagccagttaccacggttaagcagttccccaactgacttaaccttcgatcaaaccacctccccaggtggttttttcgtttacagggcaaaagattacgcgcagaaaaaaaggatctcaagaagatcctttgatcttttctactgaaccgctctagatttcagtgcaatttatctcttcaaatgtagcacctgaagtcagccccatacgatataagttgtaattctcatgttagtcatgccccgcgcccaccggaaggagctgactgggttgaaggctctcaagggcatcggtcgagatcccggtgcctaatgagtgagctaacttacattaattgcgttgcgctcactgcccgctttccagtcgggaaacctgtcgtgccagctgcattaatgaatcggccaacgcgcggggagaggcggtttgcgtattgggcgccagggtggtttttcttttcaccagtgagacgggcaacagctgattgcccttcaccgcctggccctgagagagttgcagcaagcggtccacgctggtttgccccagcaggcgaaaatcctgtttgatggtggttaacggcgggatataacatgagctgtcttcggtatcgtcgtatcccactaccgagatgtccgcaccaacgcgcagcccggactcggtaatggcgcgcattgcgcccagcgccatctgatcgttggcaaccagcatcgcagtgggaacgatgccctcattcagcatttgcatggtttgttgaaaaccggacatggcactccagtcgccttcccgttccgctatcggctgaatttgattgcgagtgagatatttatgccagccagccagacgcagacgcgccgagacagaacttaatgggcccgctaacagcgcgatttgctggtgacccaatgcgaccagatgctccacgcccagtcgcgtaccgtcttcatgggagaaaataatactgttgatgggtgtctggtcagagacatcaagaaataacgccggaacattagtgcaggcagcttccacagcaatggcatcctggtcatccagcggatagttaatgatcagcccactgacgcgttgcgcgagaagattgtgcaccgccgctttacaggcttcgacgccgcttcgttctaccatcgacaccaccacgctggcacccagttgatcggcgcgagatttaatcgccgcgacaatttgcgacggcgcgtgcagggccagactggaggtggcaacgccaatcagcaacgactgtttgcccgccagttgttgtgccacgcggttgggaatgtaattcagctccgccatcgccgcttccactttttcccgcgttttcgcagaaacgtggctggcctggttcaccacgcgggaaacggtctgataagagacaccggcatactctgcgacatcgtataacgttactggtttcacattcaccaccctgaattgactctcttccgggcgctatcatgccataccgcgaaaggttttgcgccattcgatggtgtccaaataaaacgaaaggctcagtcgaaagactgggcctttcgttttatctgttgtttgtcggtgaacgctctcctgagtaggacaaatgcggccgctaatgtgagttagctcactcattaggcaccccaggctttacactttatgcttccggctcgtatgttgtgtggaattgtgagcggataacaagtcgacgtaacctgccggataggcagccaagaatggtattcgatggggaagaacttcacgcgagctgtaacctgccggataggcagccaagaattagcctgcaggaattccgagcgaaggagatatacatatgcttaatccaatagagctttatgaagatgaatcgctagagagctgtttattaaggatcagtcagaataattgctatgattcatttcaggattttagcgatgaagtttggtttcaagtcaaagaagaggatcgtgaggttcgaggaactttccctgcaaccctaaatacggtaaatatctatcactctcacacatcaagtgacttaaagctcaaagcactaattaaaattgagcagtggcttgagataaataactcccctttattaaaaagcgccttgagcagatcaagcagtactttcttacgccaacattctgctgtttttagaaatggtgttgatataccaagaatcctgctcagaaaaaatggtattccagtatgccctgagtgcctaaaagagaacgaatacatacgtcaagaatggcacttcatcactcacgatgtatgcacaaggcataaaataggtctattacatcactgcccagagtgtaaagcctctatcaattatcaaaaaattgaaaacattacggtttgtcagtgtggattcaaattcagtgatcacttagctccgcaagcaaatagcaatgccttactcattgcacaatggcttaacggcgaaaatactaaattagctaatatttggggagaacaccaagcaatatcatctcgctttggtgtcttactttggtatatcaatagatataatctgacagatgatttttctacttcatttgtaaaatattcattgaattggccctcgaacttctattccgaactcgatgagcaaatagataaagctaaaacagttcagattaaaccatttaataagatattttttaatgagatatttgataacctgttattagattgccaacgcttacctacacgagaatttaaaacgaatcccatattaagtcatgtatatcagtactttctatctcgctaccaaattcaacctaactctgatgttttctcaatcttgctaagcccattagaggcatcgagcttgctttcttgcactaccgatcaaatctatcgtttatatgaattaggttttcttaaattaggcgttaggccaaaactgcatcaaaaaatagcaagtcaccaatcagtttttacactctcaagtattattctagtcaaactttcaaacatgcaatccagtcaagatgaattgcatcactacctttcagcgtggtaactaatggaatttacagatattctcatcattcaagatgtaaaggaacgcaacagagctttcaaggttgcatttgctcactactcttcagctatttttattgatgatcatgaagtcgaagcgattacatgcctacttaatttgtgtacgccaaaaacggaggattacctagacaaaactagcgcatctctgtttttaaataatcatgataatattcaaaagtgtcttgacgaacttaagtggttccatagtcacaatgttaaatatccagattgccgagttaaggggcaaagcattatttctttaccaatcgattcagtaagtaacaccataaacagtaatgtagttccttatcgattaggttggtcccatgacagtggaaaggttaactatactcattttctactctcttgctttaaatggagaggagtacaaacaactcttagtcaattattcataaccgacacgctgttttggttagacatcataaaaaaaatacaatgtaactggaccaagaaacaaactgagcaatttattcattccatacaaaaagaaatgcctgcaaaaacacttccagaagatattagcccatactcaaaacagatcttattcccatataaaaatgactatctaactttaactcctgttacttctaactcaattcaaacatggttagaacaccaatctaggaaacctaatgatattcgctggattaaacgagaaagtaagcaccctgctagtgtaggcgctttatcatcttctatcggtggataccatagcttactatcttcgctaccaagcacatcacaatcaccacactcgtatcacgataatatgactagcaaaactgaatgtagagaggctttttgtgcttcagctatcactgagaaaagtacgactgacgcattacaaaggctcatcagttctgaagtaagaatgaatgtgaaacatagaaaacaaatcagaaaatcagggattcatttcattagacaaaaaatagctctttggcttactcctctgattcgatggagagatcatatagataataaccagatacaaatcactaatgaccatccatcattagttaacctattcttgtcgtctcctattgctaattttcccgatttattaacaccattgcataatcacctaaatcaaactctaggaaataataaatacacaaaacgctttgcttatcaccctgatttaatgcctattttcaaatcacaaatttcatggattctgaataaactaacacaagatgaaaatataaatcagcagcccgttttaactagaacccaatttatccatcttaaaaatttaaggctatacaatggcaatgcgttaagctccccctatgtttgtggactaccttcactaactggtttttgggggtttatgcatgacttcgagcgaagattaaaaacaaagattgaagaaaacattcattttgaggctttcagcctatttgttcatcaatatgaattacaatcatctcctccgctctgtgaggcttcggatgtttataaaaaaagagaactatcacctgcaaaacgtttattaacgcaaccttcttattcttgtgatatgcgttttgacctcattatcaaagttcacactgaggttaatttaagcgatattagtcaacgtatgcaatctgcaatgcctgctcgttgtgttggtggtacgttacatcaaccttcgttacatgagagcttagaatggcttagaacctatacatcgtctgagcatttatttgaagaattagcttgccttcctaactctggtcgctggatatacccaccatcggaaacatttaacactccagatgaatttctttctatattgggaaatagcacacaccttgctatttgtaatggttattcatttcttgaagatcctacatatagagagaatgtgagccttaatcaacacgtattttgtgaacctttaattggattagcagagcaagtaatacctatagatatgagacttaaccgacaaaaacattatttttcaaatgctttttggtcgatcaatagtgatttcaattctattcttatttcaaaagcatgagtaaggatacgctatgaagctttgtaataacctgaactacactcgatcattgtcaccgggaaaggctgttttttattatgaaagtaaagatggtcaaatgaatcctattaagtgtgagcaaactcatttaagagcgcctaaagctggattttcagaggcttttaatagcgattactcaactaaaaacactgctccacaagatctctcctttagtaaccctcaatttattgaagagtgttatgttcctgttggtattgatgaaatcaaaattcgattttcattacgtatagaagcaaattcattacaaccagataaatgctctgatattcaaattagagaaatattgcaagcattcgccactaaatataaagaaaatggcggctatcaagaacttggtgaacgatacgcaaaaaacttactttctggtacttggctatggcggaatgagcataatctaggtacaagtatttcaataaaaacaacaagtaaccaagaatttaatatcaataatgcctttaagctatcaagaaaaacctccgctaaagataaaaaaacaatatcaaagttaggaagtgaaatcgcaagtgcattatctgaccctgaccattattactttgccgatataacagcaacaatcaatgtggctttctgccaagaaatttatcctagccaagagtttttagacactaaagaaaaagggaagccaagcaaagtatatgcaaaaacgtcacttcaaactggtgaaaaaaccattgcttttcatgcacaaaagattggagctgcaattcaacttatcgacgattggtgggctgacgatgccgatattccattaagagtaaatgagtttggtgctgatcatcacaatgtcatagccagaaggcacccctcacatcgtaatgacttttataccttaattcaaaacgctgataactactgcgcgcaactgaatgaaaattcagatattactgatgatatgcattacgttatggctgtattagtaaaaggaggactgtttcaaaaaagtgcttcttcaaaaaaaggaaagtagatgctcactcactattttagtattacgtatgtgcctgatgattgtgataatgagttattggcaggacgttgcatcgctgaatttcacaagtttatctctagtctaaggctgatagaaaacaactcttttgccattggcttcccaaattggtctgaacaaagtattgggaatgaatttgctattttttctgataactctgaattattaagtgccattaagtaccagccctatttcaatttaatgaagagtgaggaattattttctattacagacatcaagcctgtgccaaataatcttcctcaaataagattcatcagaaaccagtctattgggaaaatatttataggttcaaaaaaacgtagaatccagcgttcaatcacaagaaataataaagagcatacacctatatcaaatgaggacagagagtttgataccttccacaaagtgtcgtgctctagtaaaagtaaacagcaacaatttatccttcatattcaaaaagacatcaccccgagaactacagactctaacgatagctacaatagttatggcttagcgacaaatagtaaacatttaggcactgttcctgatttatcaaaaatacctttttattgcgaggacaaattatcaaataaagatcaatgacctttaataaggagatatagcatgtacgttcgtacactaaaacaatctcaagtaaaaaacattagcaaatttatgagcctgaagaatgattcgatcattcgtacagaatctatgcttgaatttgatatgtgctttcatcttgaatattctcctgatgttgttagctttgaatctcaacctcaaggctttcattacgaatatcaaggaaaacgcctcccctatactccagattttctcattacacattcatctggacagcaacaattactcgaggttaaacctctttctaaaacccaatgtcctgattttcaatcaaaattcatccaaaaacagcaagcagcccagaaattaaatctttcattaatccttattaccgaaaagcaaattagaacaggtcatttactcaacaacttcaaacttctgcatagatatgctggcctacatagtatatcggccactcaaaaatcaatcattaacctcatccagacagtaaataaaattcaaattaatcaaattgcacacaggttaaatatcagtaatggagaggtattagctggtgttttaagttggctatcaaaagggacactgcaaacggtttacacaaatgaaatgattaatggcaactctattgtatcgttaggtttatcaatggatatagaatttccatttactgatgaatttcaaaaaatattaactactcaatcctatccagctgaaatcactaatgataaaaaaacagaagtgcttacgccttctcttgattcatacgatgacgctataaaagcagaagtattgcgtcgtatttcttttcttaggtggataaagcctcgtttaaaaggtggatggacagaaaaaaatttaacacctcttcttaacgatgctgaaattgatttaaaagtgagcgcaccaaaatggcgaacccttgctgaatggcataagaattatcacaaaagtggggaaaaggtatcctctttaattccaaagcactcacataaaggtaataaaaatatgaatactgatagcgattttttgataacaaaagcaattaacgaaaaatatttaacactaaaccgatgctctatcagtcaaacttttaagtactattgtgatttagtaataattgaaaatcgctctatacctacaaagaaaataaaactggtcagtcaacgtactttttataaccgaatcaatgcactacctaaatatgatgtcgctttaaagcgttacggaaaacgatatgctgatattaattaccgcaccgtagataaaatgataacagcaacaaggcctttagaacgagtagaaatagaccacacgcctcttgacttaatcttgctcgatgacactttagagataccattaggtcgcccatacttaacaattttaatagatagctatagtaaatgcatcgtgggctacaatcttagcttcaggcctcctagctttgaatctattcgccatgctttttgtaatgcatgccttgataaatctttaattacacagcaatatcctcaccttcaacacgattggcctgttgcaggaaaaattgaaaatcttgttgttgataatggcgctgagttctggagtaatagcttagaagatagtttactgccttttgctaccaatattttatataacaaggttggtgaaccgtggatgaaacctcttgttgaaaagttttttgacctgttaaataaaggcttagtccattccctcccaggaacaactcgctcaagaatagagcaactgaaaggttataatcctaaaaaagatgcagcgattacattcagtttatttttagaactatttcatacgtggattatcgacatctatcacatgacttccgatacaagagagactgctgttccttattttaaatggcaagaaggagtaacggctttaccccctctcacctatacagatgaagaggctcaacaattacgaatagagcttggaatattaaatactcgaacggttcgtcttggaggtatttttcttcatggattacgttatgaatcagaagagttaagtgaatacagaaaaatttggggggctattgataagaataacctaacgctgaaaacaaaaaccgacccttcagatatatcacatatttttgtctatttaactaatgaatcacgctatattaaagttccttgcataacagatattagttatacatccggacttacgttatttcagcatcaaaccgctcaaaaattgcaaagaactaaaacaagattacaaatagatcatgaaaaactcgctgattcacgtatgtatgttgaaaatagaattgcggaagaagtggagaaaatcaaatctaataaaaaacgtactgcgaaaactacccatgcatcaaagatcgctcgacaccaagatattggtagtcatactcaaaagtcgattcaagtacctaatgagcaaagtgaaatcaaaaaactgaataaaaatgaacatgatgttttaaatggatgggatgaacaacatgatgatttagagggattctgatgcacactttatcttcgactcaaaaagagcaactcatcagctttaatcaatgctttattgagtatccaataattactcatatctactctatttttaatgatttacgaatgaatcaaggtttaggtgcagaaccacaatgtatgctcttacttggtgatactggctcaggaaaatcagcactcattaataactatctgttacgacaaccgccatcaaatttttccgcactcagttcattacccgttttacatacacgtatcccacgtagagtgaataacgaacaaaccatgtatcaactgttaactgacttaggacaatcaccttcaggatcgagacgtgcaaaacgctcagaaatcgctctcgccgaaggagtcgttcgagctttaaagcgtaaaaaaacagaactcattattattaatgagttccaagaactcatcgaattttcaagtgctaaagaacgtcagaatgtcgctaacacgcttaaatacattagtgaagaagctagagtatctattgtgttagttggtatgccctatgcagatattattgctgaggagcctcaatggggatctcgcttaacatggaaaacacaaatcgaatatttttcattaaaaaatgacatgaaaacctatgttcaattcctaaaaggcctagcaaatcgaatgggatatgatgaggtgccatcattgcatagcaaggagcttgctattccactgttttcaatttgtaggggtgagctaaggcaacttaaaaacttctgctctgatgcgatgctagagagctttaagcaaaacaaaaacacactaactcatgatgtattaagtgccactttcaagtacaaattcccaacgaagaaaaatccatttgaaatgaatgtagctgacgttccaattcaagaggtagagtcttattcaaagtataatctaaacgcaatgactgatgatgaacgtcttactgcaactaagtttcttgatgctatgtctttatcttcactgttgagtaagacttgacctaggctgctgccaccgctgagcaataactagcataaccccttggggcctctaaacgggtcttgaggggttttttgctgaaacctcaggcatttgagaagcacacggtcacactgcttccggtagtcaataaacgaggaagcggaagagcgatgtggctggggcttccacccaactgatgcttgcaaaattactctgcataaattgcaaagaagtctacaaatttgcaaaataagcctgcataaactacctttagttgtaagtttacaacatagaggtgaatatcatgtacgttcgtacactaaaacaatctcaagtaaaaaacattagcaaatttatgagcctgaagaatgattcgatcattcgtacagaatctatgcttgaatttgatatgtgctttcatcttgaatattctcctgatgttgtacgcccctatccattttagcggatcctactaggagcacgtgttgacaattaatcatcggcatagtatatcggcatagtataatacgacaaggtgaggaactaaaccatgaacatcaaaaagtttgcaaaacaagcaacagtattaacctttactaccgcactgctggcaggaggcgcaactcaagcgtttgcgaaagaaacgaaccaaaagccatataaggaaacatacggcatttcccatattacacgccatgatatgctgcaaatccctgaacagcaaaaaaatgaaaaatataaagttcctgagttcgattcgtccacaattaaaaatatctcttctgcaaaaggcctggacgtttgggacagctggccattacaaaacactgacggcactgtcgcaaactatcacggctaccacatcgtctttgcattagccggagatcctaaaaatgcggatgacacatcgatttacatgttctatcaaaaagtcggcgaaacttctattgacagctggaaaaacgctggccgcgtctttaaagacagcgacaaattcgatgcaaatgattctatcctaaaagaccaaacacaagaatggtcaggttcagccacatttacatctgacggaaaaatccgtttattctacactgatttctccggtaaacattacggcaaacaaacactgacaactgcacaagttaacgtatcagcatcagacagctctttgaacatcaacggtgtagaggattataaatcaatctttgacggtgacggaaaaacgtatcaaaatgtacagcagttcatcgatgaaggcaactacagctcaggcgacaaccatacgctgagagatcctcactacgtagaagataaaggccacaaatacttagtatttgaagcaaacactggaactgaagatggctaccaaggcgaagaatctttatttaacaaagcatactatggcaaaagcacatcattcttccgtcaagaaagtcaaaaacttctgcaaagcgataaaaaacgcacggctgagttagcaaacggcgctctcggtatgattgagctaaacgatgattacacactgaaaaaagtgatgaaaccgctgattgcatctaacacagtaacagatgaaattgaacgcgcgaacgtctttaaaatgaacggcaaatggtacctgttcactgactcccgcggatcaaaaatgacgattgacggcattacgtctaacgatatttacatgcttggttatgtttctaattctttaactggcccatacaagccgctgaacaaaactggccttgtgttaaaaatggatcttgatcctaacgatgtaacctttacttactcacacttcgctgtacctcaagcgaaaggaaacaatgtcgtgattacaagctatatgacaaacagaggattctacgcagacaaacaatcaacgtttgcgcctagcttcctgctgaacatcaaaggcaagaaaacatctgttgtcaaagacagcatccttgaacaaggacaattaacagttaacaaataaggaggacaatcatggagaaaaaaatcactggatataccaccgttgatatatcccaatggcatcgtaaagaacattttgaggcatttcagtcagttgctcaatgtacctataaccagaccgttcagctggatattacggcctttttaaagaccgtaaagaaaaataagcacaagttttatccggcctttattcacattcttgcccgcctgatgaatgctcatccggaattccgtatggcaatgaaagacggtgagctggtgatatgggatagtgttcacccttgttacaccgttttccatgagcaaactgaaacgttttcatcgctctggagtgaataccacgacgatttccggcagtttctacacatatattcgcaagatgtggcgtgttacggtgaaaacctggcctatttccctaaagggtttattgagaatatgtttttcgtctcagccaatccctgggtgagtttcaccagttttgatttaaacgtggccaatatggacaacttcttcgcccccgttttcaccgtgggcaaatattatacgcaaggcgacaaggtgctgatgccgctggcgattcaggttcatcatgccgtctgtgatggcttccatgtcggcagaatgcttaatgaattacaacagtactgcgatgagtggcagggcggggcgtaatcgcgatatcagcacacaattgcccattatacgcgcgtataatggactattgtgtgctgataggatcctcatctgttacgccggcggtagccggccagcctcgcagagcaggattcccgttgagcaccgccaggtgcgaataagggacagtgaagaaggaacacccgctcgcgggtgggcctacttcacctatcctgcccggctgacgccgttggatacaccaaggaaagtctacacgaaccctttggcaaaatcctgtatatcgtgcgaaaaaggatggatataccgaaaaaatcgctataatgaccccgaagcagggttatgcagcggaaaagcgctctttgttgatacaaccataaaatgataattacacccataaattgataattatcacacccataaattgatattgcctcttcatggtctaaacttcagtaagtttacgacattttcctcgaggtcatttccggggatccgcgatcgcttctccttacgcatctgtgcggtatttcaggtaccgagacgggtttaaggaggaagattttatgatacaaaagttatctgtatttatctaatttaagtggctactctaagaaggttctgtccaaaaaaaagttacatttattaataacacatgaaattaaattacatactaaaattacagtcatattttaaggtaaaacattttgcagactatcactgcaaaaccatgtgatcttatgttgcaaattcaaaactaagcttttgatttttatatgagagctatgcaagcttatgttgcaagcatcaccaactgatgcttgcaaaatcactcgacgtcaggtggcacttttcccggtaaaccagcaatagacataagcggctatttaacgaccctgccctgaaccgacgaccgggtcatcgtggccggatcttgcggcccctcggcttgaacgaattgttagacattatttgccgactaccttggtgatctcgcctttcacgtagtggacaaattcttccaactgatctgcgcgcgaggccaagcgatcttcttcttgtccaagataagcctgtctagcttcaagtatgacgggctgatactgggccggcaggcgctccattgcccagtcggcagcgacatccttcggcgcgattttgccggttactgcgctgtaccaaatgcgggacaacgtaagcactacatttcgctcatcgccagcccagtcgggcggcgagttccatagcgttaaggtttcatttagcgcctcaaatagatcctgttcaggaaccggatcaaagagttcctccgccgctggacctaccaaggcaacgctatgttctcttgcttttgtcagcaagatagccagatcaatgtcgatcgtggctggctcgaagatacctgcaagaatgtcattgcgctgccattctccaaattgcagttcgcgcttagctggataacgccacggaatgatgtcgtcgtgcacaacaatggtgacttctacagcgcggagaatctcgctctctccaggggaagccgaagtttccaaaaggtcgttgatcaaagctcgccgcgttgtttcatcaagccttacggtcaccgtaaccagcaaatcaatatcactgtgtggcttcaggccgccatccactgcggagccgtacaaatgtacggccagcaacgtcggttcgagatggcgctcgatgacgccaactacctctgatagttgagtcgatacttcggcgatcaccgcttccctcatactcttcctttttcaatattattgaagcatttatcagggttattgtctcatgagcggatacatatttgaatgtatttagaaaaataaacaaa

SEQ ID NO: 38 - DNA, 16142 bp, synthetic construct
  source 1..16142: mol_type = other DNA
tagctagctcactcggtcgctacgctccgggcgtgagactgcggcgggcgctgcggacacatacaaagttacccacagattccgtggataagcaggggactaacatgtgaggcaaaacagcagggccgcgccggtggcgtttttccataggctccgccctcctgccagagttcacataaacagacgcttttccggtgcatctgtgggagccgtgaggctcaaccatgaatctgacagtacgggcgaaacccgacaggacttaaagatccccaccgtttccggcgggtcgctccctcttgcgctctcctgttccgaccctgccgtttaccggatacctgttccgcctttctcccttacgggaagtgtggcgctttctcatagctcacacactggtatctcggctcggtgtaggtcgttcgctccaagctgggctgtaagcaagaactccccgttcagcccgactgctgcgccttatccggtaactgttcacttgagtccaacccggaaaagcacggtaaaacgccactggcagcagccattggtaactgggagttcgcagaggatttgtttagctaaacacgcggttgctcttgaagtgtgcgccaaagtccggctacactggaaggacagatttggttgctgtgctctgcgaaagccagttaccacggttaagcagttccccaactgacttaaccttcgatcaaaccacctccccaggtggttttttcgtttacagggcaaaagattacgcgcagaaaaaaaggatctcaagaagatcctttgatcttttctactgaaccgctctagatttcagtgcaatttatctcttcaaatgtagcacctgaagtcagccccatacgatataagttgtaattctcatgttagtcatgccccgcgcccaccggaaggagctgactgggttgaaggctctcaagggcatcggtcgagatcccggtgcctaatgagtgagctaacttacattaattgcgttgcgctcactgcccgctttccagtcgggaaacctgtcgtgccagctgcattaatgaatcggccaacgcgcggggagaggcggtttgcgtattgggcgccagggtggtttttcttttcaccagtgagacgggcaacagctgattgcccttcaccgcctggccctgagagagttgcagcaagcggtccacgctggtttgccccagcaggcgaaaatcctgtttgatggtggttaacggcgggatataacatgagctgtcttcggtatcgtcgtatcccactaccgagatgtccgcaccaacgcgcagcccggactcggtaatggcgcgcattgcgcccagcgccatctgatcgttggcaaccagcatcgcagtgggaacgatgccctcattcagcatttgcatggtttgttgaaaaccggacatggcactccagtcgccttcccgttccgctatcggctgaatttgattgcgagtgagatatttatgccagccagccagacgcagacgcgccgagacagaacttaatgggcccgctaacagcgcgatttgctggtgacccaatgcgaccagatgctccacgcccagtcgcgtaccgtcttcatgggagaaaataatactgttgatgggtgtctggtcagagacatcaagaaataacgccggaacattagtgcaggcagcttccacagcaatggcatcctggtcatccagcggatagttaatgatcagcccactgacgcgttgcgcgagaagattgtgcaccgccgctttacaggcttcgacgccgcttcgttctaccatcgacaccaccacgctggcacccagttgatcggcgcgagatttaatcgccgcgacaatttgcgacggcgcgtgcagggccagactggaggtggcaacgccaatcagcaacgactgtttgcccgccagttgttgtgccacgcggttgggaatgtaattcagctccgccatcgccgcttccactttttcccgcgttttcgcagaaacgtggctggcctggttcaccacgcgggaaacggtctgataagagacaccggcatactctgcgacatcgtataacgttactggtttcacattcaccaccctgaattgactctcttccgggcgctatcatgccataccgcgaaaggttttgcgccattcgatggtgtccaaataaaacgaaaggctcagtcgaaagactgggcctttcgttttatctgttgtttgtcggtgaacgctctcctgagtaggacaaatgcggccgctaatgtgagttagctcactcattaggcaccccaggctttacactttatgcttccggctcgtatgttgtgtggaattgtgagcggataacaaactagtgtgaactgccgagtaggtagctggaaataggagatggactacttcatggaagtatttgttgtgaactgccgagtaggtagctggaaattagccaattggaattccgagcgaaggagatatacatatgcattttttagttcaaacaaaactttatcctgatgaggctcttgaaagctatttgctaaggcttgctagggataactcatacgatggctatagtgagcttgctgatattttatggcaatggcttgtagagcaagatcatgatcttgaaggtgcgttgccgttagagctgggtaaagttgatgtttatcatgctaggcaagcgagtagctttagaataagagcgctcaagttggtagctcaattagctgatgtaaacgctggtaatattcttgcgcttgcatggcggcgcagtaattttaaatttggcaacttagtagcagtaagccgtaatgagcagacaattcctcttgagttacttcgcactgataatatacctgtttgcattgaatgcttgtttgaatcttcttacgttccttttcattggcatttaaagccctataagacgtgccataagcataaatcacaattaactacacattgtaaggaatgccataacttaattgattacagagcttctgaggagtttttagagtgcagttgtggttgtaaactaaccaatagtgaacagttaaacgatgcagactttaaaattgcatttgcgcttgcaagtagtaacagccataaaatagtggggttaatatcttggtttgcgaaggttaagcaacttgatgtaagcgatgctgactttaaccgtacttttgttgattactttagtacttggcctgaaagccttactactgaattagatttactcacaaacaatgcgcgcctcaagcaacttaacccttttaataaaactaagttcaactctgtttatggaaatgtgatccgtgatggtcaaatagctgcaacaagtaaccgtaaaaacaaagtacttgatgaactaattaaatattttgttgaattagttgatagtaatcctaaaactaaacatccaaatattgcagatttactgctttgtacttttgataccgcagtattattaaacaccaccacagagcaagtttataggcttcatcaagaaggctttttaaactgcgcttacccacaaaaaaagcacgaacagctcagagctgatagtcatgttttttatttacgccaagtgattgagctacagcaagcattcgcagctgaaacgcctcaaacaaaaaaacaatttatagcgccgtggtaacttatgaacttacaagatgcatttgcgattgaatcacttaaggaaaaaaccacagcacttagaaagttgtttactccatatatgtctcatgttgcggtagatggctttgaagaacaagcgctgactgtgctcattaacctagtttataaacgaagtgagattgatgatttaacaagtacaagaaccgctaaaagtgtattacgtgatgaagtgttactgagtaaatgtattaacgaagttaaatggtttcatactcataatttaaaatatcctgatatacgcgtaagccatcaacgtttaattagtaaggtagtaagtgaagatattgcgggtatttgtagccggtcattacctttaagttttggatggtcgcacaacagtgctgaaattaatcatgcaaagttatttttaacctcatttacttggcaaggtgaagtaacttgtttagcaaatttactaataaatgaggagcctgtttggattaatttaataaggacatacgggtttactaaaaaggcggttttaggcatcgcgggtaaaataaaacagcttttgccagtggcagaactcccattagaagtaagctctttttcaccacaattacaaatgccatttcagcaaagctaccttgcggttacgcctgtagtaagtcacgcaatgctggctaaaattcagcaattaacaacagatcgtaagttaaattttggtttagttgagcactcaagacctgccaatgttggcgatttagcaagctcagtaggtggtaatattagagtgctgcgttactttcctaaaacatattcaaaggctgttaactgctctgaagtattcaataatgatagtgagaaagcatttaaaattcgtgcgctattaaacagtcaatttcaacaggcgcttttggtattggtcggtattaaacagtttaatacgttaaggcaaaagcgattagcgcgagtagcggctattaggcaagtacgtgttagcttgcagttgtggctggataacattctggaagctaaaaataacgctcaagggcaagcctaccctgagtgggcaaagcattacttagatcagagtattactaactgcattagccaatttagtaacgtactaaatgagagccttggtaatttaagtaagctcaaacgctttgcgtatcaccctaatttaatgggggtgtttaaaacgcagttaaactatgtgtttactcactgtattcctgatgaagaaacattaaatgatgagcaaatagtgtatgtgcattgccaagatatgcgagtgtttgatgctgaggcaatggctaatccgtatattcaaggtatgccgtcacttacagctttaaatgggcttgctcataactttgagcgtaagctaaaaaattttatagacccttcaattaagtgtattggtagtgccattaacattgaaagttatcaactacatacaggtaaaccattacctgaaccaagtaagttaaaacaagttgctggccgtagtcatgtcataagatcaggaattatcgataaacctaaatgcgatataacactcgatttagtctttaggctttttgtaccaaacattaagctgttagataagttaaatagtcagcttgtgaaacccgcactaccatctatgtttgcaggcgggactatgcatccaccttcgttataccaaaatattgactggtgccatttacatactaaaccaagtgagctgtttaaaaatataaaggcaaaatcgttaaatggcagttggttgtacccttcaaaaaaagtagtcaaaagttttgaacagttgattgatgcgcttaacggtaactttaatttaagacctgctgccattggttttgctgcgcttgaagaacccataaagcgagatgtagccttacatgaataccattgttatgctgagcccgtaattgggcttttagagtgtgttagcaatacatcagttaagtacgcaggggctaagcagttcttccatgacgcattttgggttatggatgttcaaaaagagtctatgcttatgaaaaagtctaagtttgagtatgaataatgcaattacctcggcatttaagttacacgcgttcgctttcacccagtaaagcggtatttttttataaaacatcggagtctgattttgaaccgctgcaaatagagcaaaataagcttgttgggcaaaagtcagggtttggcgatgcgtatcaaaagcaaaatgtggctaaaaatttagcgccacaagatctagcgtttggaaacccacaaacgattgatgtgtgctacgtacctccagcagtaaatgagctattttgccgtttttcactcagggttgaggctaatagcaatgaaccacacgtttgtgatgaccctaaagttatttattggttaaaacggttttttgaaacctacaaaaaacacaatggtcttaatgaagttgcaactcgctatgctaaaaatatactgatggggaactggctttggcgtaaccgccaatcaccaaatgttgatattgaaatccttactgaacatgcagccccgatcattgttgaaggtgcacaaaaactaaaatggcaaggcaactggcaaaacaatcaaacagcattaataacattatcagaagctattcaagaagggcttagcaatcctcaaaattattgttatttagatataaccgcaaaaattaaaaatgcatttagccaagaggttcaccctagtcaaaagtttgtagacaatgttgaacaaggcatgtcatctaaacaacttgcatacactcaagtcggcgataaaaaagcagccagtttaaactcacaaaaagtaggggctgcgattcaaactattgatgattggtatgagggaggttacaaacctttacgcactcacgagtatggtgcagataagcaaatattagttgcacatagaacgcctaagagccattcagacttttattcattacttccgcgcattgccttgcatattaagcacatggaaaagcatggtttagagcaaagtgaagaatcaaacgcagttcactttattgcagcagtgttgatcaaaggcggcttgttccaaaggagtaaggcatgaagcgctattattttactattacttatttacctaaaaattgtgatgtaagcctccttgcagggcgttgtatcggcatattgcatgggtttatgagttcgcgtgaaattagtaatataggtgtgtgttttcctaaatggaatgagcaagagataggtaatgaattggcgtttgtatcgacagataaaaagcaattaaccaatctatctcagcaaagctattttgagatgatggctcaggataaattatttggcttatcaaaaatactcgaagtaccaacaaaccaaaatgaggttatgtttattcgcaaccaatcagtagctaaggcttttgttggcgaaaagcaaagacgtttaaaacgcgctaaaaaacgagctgaagccagaggtgaagtttataatcctgaatatcaatttgaggcaaaagacataggccattttcattcaatacctgtatcaagcaaagccaacggccaaagttatgttctgcatatacaaaaaattgaaaatactaatgcgacagaaaatcaatttaataattatggctttgctacaaatcaaacatttcaaggtacggttccttctttgaatacccaataacctttaataaggagatatagcatgtacagaagaaaactcaaacactcccgtgttaaaaaccttcataaatttgctagtcaaaaaaataaatctacctgtttagttgaatcctctttagagtttgatgcctgttttcattttgaattttcaccatcaatagccgcatttgaggcacaaccactaggttatgaatatgagtttgataaccgtatttgccgttacacacctgactttttacttacccacacagacggcacgcaaaaatttatagaagtaaaaccgcaaagcaaaattgctgacgaggactttcgtgcacgttttattgaaaagcaaaccatcgctaaacaagatggacgcgacttaatactggttactgataaacaaatccgtgtatacccaacactcaataacttaaaacttttacatcgctattctggttttcagtctttaacagagctgcaagcatcggtgctcgagcttgttaagcaatacggctctattaaagtgggccagttagttaactttttaaaagtaactgccggtgagctacttgctactgtgctacgcttattatcactagggcagttatttgccgacttaactacaaatgaaatatcaatagaaacagcaatttggtctaacaatgtttaatgacggtttgtttgatgatgagtttaaccagccattaccaaaagtagaaaccaaactacctcaaaattacgccaaagatttacaagcccttcctgaaaaaattaaaaatacaacatttgctaaacttaaatatattcaatggcttgaggctaatattcaaggtggctggacacaaaaaaaccttgagcctttattgaaagtaatgcctgaagttgagggtgaaaaaaagcctagctggagaacagctgcacgatggtatagcgcttatacaaatgcagataaaaatatcatggcgctaataccaagccatcaaaaaaagggtaacagggagcgcgatacagccaccgataagttttttgaaaaagcacttgagcgttacttagtaaaagaaaagccatcagtggcttctgcttacaagtattacgcagacttagttatcattgaaaacgacagcgttgtgggcagtgttttaaagcctttaacatacaaagcgtttaaaaatagaatcgataatttaccgcaatacgacgtgatggtttctcgctatggtaagcgtcttgctgatattgcttttaataaagtagaagggcatacacggcctacccgagtactcgaaaaagttgaaattgaccatacaccgcttgatcttattttattagatgatgagctacatatcccgcttggtaggccaacacttaccatgttagtcgatgtgtatagccattgtattgttggcttctactttagcttcagcgagcctagctatgatgcagtaaggcgagcaatgctaaatgcaatgaaacctaaaagtgatgtggcaaaactatacccagatacgataaatgagtggaaatgtgctggcaaaattgaaactctcgttgttgataatggcgctgaattttggagtaacagccttgaacttgcttgtgaagaaattggtattaatactcaatataaccctgttgcaaagccgtggttaaaaccctttgtagaacgtatgtttggcacaattaacactgaattattagaccctgttcctggtaaaaccttttctaacattttacaaaagcatgaatacaatcccaaaaaagatgcaatcatgcgctttacaacctttatgcagctattccataaatgggtagtagacgtttaccatcaagatgccgatagccgctttaagtacatacctagccaactatgggagcaaggctttaatacgttaccgccaacagtgctgagtaatgctgatcttcaacaattagatgttgtgctcagtatttcaaaccatagggtgcttcgtaaaggtggaatacggctagaaaatttaagctacgacagtactgaactagccaactatagaaaacagtttagccataaagtatctcaagaagttttaattaaattaaaccccgatgatatttcttatatatatgtttacctcgataagctagagcattacataaaagtgccatgcatagatccaaacggttacacccaaaatttaagtttgaatcagcataaaataaatatacgtattcatcgcgattttatttccggatctatcgataatgtaggcttagcaaaagcgcgtatgtttattcataataaaattcaaaacgagtttgaagagttaaaaaatgcaccaaaacactcaaaagtaaaagggggtaaagcattagctaagcatcaaaatgtaagtagtgactcacaaaaatcaatagctcagagcgagccattagaacccaaaaaggttacacctaaagagcaaccaacagatagctgggatgactttatttcagacctagatggattttaattatgctgaccgataaacaaaaagcaaaacttaatgaatttcgcgatgtatttattgaatacccaataataactactgtatttaacgactttgacagattaagacttggtaaaggattagcgggcgaaaagccctgcatgctgttaaatggcgatacaggcacaggtaaaacagcactaataaaacagtataaagaacgccatttaccgcaatttattaatggagtgatgaaccaccctgtattagtaagccgcatacctagtaacccgacactagaatctactttagccgagcttcttaaagacttagggcaagtaggtagtacagagcgcaagctgagaataaacggtacgcggttaacgacatcattaataaaatgcctaaaaacgtgtggcacagagcttataattattgatgagtttcaagagctgattgagcacaaccaaggtaaaaagcgccgcgagattgctaatcgattaaaatacattaacgatgaagcgggtgtatcgattgtattggtgggtatgccgtgggcagaaaaaatagcagacgaaccccagtggtcatcgcgtttattagtaaggcggcagctgccttattttaaattatcagaaaacccaaagcattttgtacagttaataattggcctagctaaccgtatgccattcaccgaaaagccaaaattaagtgagcaagcaacagtatttgctttgttctcattgtcaaaaggctgttttagaactcttaaatactttttagatgatgccgtactttatgcattaatggataacgcgaaaaccctcacaaccaagcatctagttaaagcatttggagtactgtttcctgatgtaccaaacctatttaccttgcccgttgcagaaattacagcaagtgaagttgagcgctattcactttataaacttgaaagcgcccaagatgaagatccgtttatagcgactaagtttactgaccaaatgccgattagtcagttgttgaggaagtaacctaggctgctgccaccgctgagcaataactagcataaccccttggggcctctaaacgggtcttgaggggttttttgctgaaacctcaggcatttgagaagcacacggtcacactgcttccggtagtcaataaacgaggaagcggaagagcactgccacccaaattcctcatttggtgttgtttgaagtataagttgacatatttgtactaaaagatggcataaattggaagtataaggtggcatagtctagtatttaaccaaatggttagatggttgactcacatgtacagaagaaaactcaaacactcccgtgttaaaaaccttcataaatttgctagtcaaaaaaataaatctacctgtttagttgaatcctctttagagtttgatgcctgttttcattttgaattttcaccatcaatagccgattagacggacgcaatcttgggatccgagccccaactggggtaacctttgagttctctcagttgggggagcacgtgttgacaattaatcatcggcatagtatatcggcatagtataatacgacaaggtgaggaactaaaccatgtcacatctcgcagaactggttgccagtgcgaaggcggccattagccaggcgtcagatgttgccgcgttagataatgtgcgcgtcgaatatttgggtaaaaaagggcacttaacccttcagatgacgaccctgcgtgagctgccgccagaagagcgtccggcagctggtgcggttatcaacgaagcgaaagagcaggttcagcaggcgctgaatgcgcgtaaagcggaactggaaagcgctgcactgaatgcgcgtctggcggcggaaacgattgatgtctctctgccaggtcgtcgcattgaaaacggcggtctgcatccggttacccgtaccatcgaccgtatcgaaagtttcttcggtgagcttggctttaccgtggcaaccgggccggaaatcgaagacgattatcataacttcgatgctctgaacattcctggtcaccacccggcgcgcgctgaccacgacactttctggtttgacactacccgcctgctgcgtacccagacctctggcgtacagatccgcaccatgaaagcccagcagccaccgattcgtatcatcgcgcctggccgtgtttatcgtaacgactacgaccagactcacacgccgatgttccatcagatggaaggtctgattgttgataccaacatcagctttaccaacctgaaaggcacgctgcacgacttcctgcgtaacttctttgaggaagatttgcagattcgcttccgtccttcctacttcccgtttgccgaaccttctgcagaagtggacgtcatgggtaaaaacggtaaatggctggaagtgctgggctgcgggatggtgcatccgaacgtgttgcgtaacgttggcatcgacccggaagtttactctggtttcggcttcgggatggggatggagcgtctgactatgttgcgttacggcgtcaccgacctgcgttcattcttcgaaaacgatctgcgtttcctcaaacagtttaaataaggaggacaatcatgaaaaagcctgaactcaccgcgacgtctgtcgagaagtttctgatcgaaaagttcgacagcgtctccgacctgatgcagctctcggagggcgaagaatctcgtgctttcagcttcgatgtaggagggcgtggatatgtcctgcgggtaaatagctgcgccgatggtttctacaaagatcgttatgtttatcggcactttgcatcggccgcgctcccgattccggaagtgcttgacattggggaattcagcgagagcctgacctattgcatctcccgccgtgcacagggtgtcacgttgcaagacctgcctgaaaccgaactgcccgctgttctgcagccggtcgcggaggccatggatgcgatcgctgcggccgatcttagccagacgagcgggttcggcccattcggaccgcaaggaatcggtcaatacactacatggcgtgatttcatatgcgcgattgctgatccccatgtgtatcactggcaaactgtgatggacgacaccgtcagtgcgtccgtcgcgcaggctctcgatgagctgatgctttgggccgaggactgccccgaagtccggcacctcgtgcacgcggatttcggctccaacaatgtcctgacggacaatggccgcataacagcggtcattgactggagcgaggcgatgttcggggattcccaatacgaggtcgccaacatcttcttctggaggccgtggttggcttgtatggagcagcagacgcgctacttcgagcggaggcatccggagcttgcaggatcgccgcggctccgggcgtatatgctccgcattggtcttgaccaactctatcagagcttggttgacggcaatttcgatgatgcagcttgggcgcagggtcgatgcgacgcaatcgtccgatccggagccgggactgtcgggcgtacacaaatcgcccgcagaagcgcggccgtctggaccgatggctgtgtagaagtacttgccgatagtggaaaccgacgccccagcactcgtccgagggcaaaggaataacctaggctcgagtaatggtttcttagacgtcttgacagctagctcagtcctaggtataatgctagcctgtcaccggatgtgctttccggtctgatgagtccgtgaggacgaaacagcctctacaaataattttgtttaatactagagaaagaggggaaatactagatggtgtcgaaaggtgaggagcttttcacgggggtggttccaatcttagtcgagcttgatggtgacgtgaatggccataagtttagcgtgcgcggcgagggtgagggcgatgcgacgaacggtaaacttactttaaagtttatttgtactacaggcaaattaccggtcccgtggccgaccctggtcactacgcttgggtatggggtagcatgttttgcccgttaccctgaccacatgaaacagcacgatttctttaaatctgccatgcccgaagggtatgttcaggagcgcactatcagttttaaagacgacggaacgtacaaaactcgtgctgaagtaaagttcgaaggtgatacccttgtgaaccgtatcgtccttaaaggcatcgacttcaaagaggacggtaacattttaggccacaaattagagtacaacttcaattcacataaggtttatatcacagcagataagcaaaaaaatggcatcaaggcaaattttaagacccgccacaacgtagaagatggtggagtccagttggcggaccactaccagcaaaatacaccgattggcgatggtccggttttgcttcccgacaatcactatcttagccaccagagtaaactgagtaaggacccaaatgaaaagcgcgaccacatggtattgaaagagcgcgttacagcagctggaattacacacgatatggacgaactttataagtaatagggataacagggtaatcgcaaaaaaccccgcttcggcggggttttttcgcgtttaaacgtgccagggcgtgcccttgggctccccgggcgcgttttttacgcgttctagagtccttactgcagtagttttgctgaaatactcgattcacaaaaatatcaacttatggttgttttgtgagatatcaatatatggttgttttgtggttaagttgctgattataaataattattaaatatcactttatggttgcatcaacaggtaccgagctctcatctgttacgctcggcgtgtagccggccagcctcgcagagcaggattcccgttgagcaccgccaggtgcgaataagggacagtgaagaaggaacacccgctcgcgggtgggcctacttcacctatcctgcccggctgatcgccgttggatacaccaaggaaagtctacacgaaccctttggcaaaatcctgtatatcgtgcgaaaaaggatggatataccgaaaaaatcgctataatgaccccgaagcagggttatgcagcggaaaagcgcttatcagcggtaccggtagctcggctgtgaatgaaatggacttaccaattaaagtaaaaggtgatgatttattcatcaaagtttttgtgccagtgtaaaccattttccaaactgtttaagagtgatttacaacgcgtagcatgtttactttgcgttttataaagctgtatttggtagctttatgccatctattgcttcaatactatgccaatatacacttcacttaccacgctgtaagttaataaaaccgagtttggttatgtcaacttatacttcaaacaacatttgggtgaaaatacattcctttttgacgtcaggtggcacttttcccggtaaaccagcaatagacataagcggctatttaacgaccctgccctgaaccgacgaccgggtcatcgtggccggatcttgcggcccctcggcttgaacgaattgttagacattatttgccgactaccttggtgatctcgcctttcacgtagtggacaaattcttccaactgatctgcgcgcgaggccaagcgatcttcttcttgtccaagataagcctgtctagcttcaagtatgacgggctgatactgggccggcaggcgctccattgcccagtcggcagcgacatccttcggcgcgattttgccggttactgcgctgtaccaaatgcgggacaacgtaagcactacatttcgctcatcgccagcccagtcgggcggcgagttccatagcgttaaggtttcatttagcgcctcaaatagatcctgttcaggaaccggatcaaagagttcctccgccgctggacctaccaaggcaacgctatgttctcttgcttttgtcagcaagatagccagatcaatgtcgatcgtggctggctcgaagatacctgcaagaatgtcattgcgctgccattctccaaattgcagttcgcgcttagctggataacgccacggaatgatgtcgtcgtgcacaacaatggtgacttctacagcgcggagaatctcgctctctccaggggaagccgaagtttccaaaaggtcgttgatcaaagctcgccgcgttgtttcatcaagccttacggtcaccgtaaccagcaaatcaatatcactgtgtggcttcaggccgccatccactgcggagccgtacaaatgtacggccagcaacgtcggttcgagatggcgctcgatgacgccaactacctctgatagttgagtcgatacttcggcgatcaccgcttccctcatactcttcctttttcaatattattgaagcatttatcagggttattgtctcatgagcggatacatatttgaatgtatttagaaaaataaacaaa

SEQ ID NO: 39 - DNA, 15655 bp, synthetic construct
  source 1..15655: mol_type = other DNA
gcgctgcggacacatacaaagttacccacagattccgtggataagcaggggactaacatgtgaggcaaaacagcagggccgcgccggtggcgtttttccataggctccgccctcctgccagagttcacataaacagacgcttttccggtgcatctgtgggagccgtgaggctcaaccatgaatctgacagtacgggcgaaacccgacaggacttaaagatccccaccgtttccggcgggtcgctccctcttgcgctctcctgttccgaccctgccgtttaccggatacctgttccgcctttctcccttacgggaagtgtggcgctttctcatagctcacacactggtatctcggctcggtgtaggtcgttcgctccaagctgggctgtaagcaagaactccccgttcagcccgactgctgcgccttatccggtaactgttcacttgagtccaacccggaaaagcacggtaaaacgccactggcagcagccattggtaactgggagttcgcagaggatttgtttagctaaacacgcggttgctcttgaagtgtgcgccaaagtccggctacactggaaggacagatttggttgctgtgctctgcgaaagccagttaccacggttaagcagttccccaactgacttaaccttcgatcaaaccacctccccaggtggttttttcgtttacagggcaaaagattacgcgcagaaaaaaaggatctcaagaagatcctttgatcttttctactgaaccgctctagatcaagccacttcctttttgcattgacgcagggtgtcggaaggcaactcgccgaacgcgctcctatagttttcagcgaagcgtcccaaatgtaagaagccgtagtctagggctatctcagttatactacgcacattggcactgggatcgttcaagcaggcgcggatgctttcgagcttgcggttgcggatgtagttcttcggcgtggtgccggcgtgcttctcgaacaaattgtagagcgagcgtggactcatcatcgccagctccgctaaccgctcaaggctgatattccgtttgagattctcctcaatgaattgaacgactcgctcgaaagacgggttacctttgctgaaaatttcacggctgacattgctgcccagcatttcgagcagcttggaagcgatgatccccgcatagtgctcttggacccgaggcatcgactttgtatgttccgcttcgtcacaaactaacccgagtagattgataaagccatcgagttgctggagattgtgtcgcgcggcgaaacggataccctccctcggcttgtgccaattgttgtcactgcacgcccgatcaaggaccactgagggcaatttaacgataaatttctcgcaatcttctgaataggtcaggtcggcttggtcatccggattgagcagcaatagttcgcccggcgcaaaatagtgctcctggccatggccacgccacaggcaatggcctttgagtattatttgcagatgataacatgtttctaatccaggcgagattaccctcacgctaccgccgtagctgattcgacacagatcgaggcatccgaagattctgtggtgcagcctgcctgccgggcgcccgcccttgggcaggcgaatagagtgcgtaccgacatactggttaacataatcggagactgcatagggctcggcgtggacgaagatctgacttttctcgttcaataagcaaaaatccatagttcacggttctcttattttaatgtgggctgcttggtgtgatgtagaaaggcgccaagtcgatgaaaatgcatctcgacgtgatgcgtatacgggttacccccattgccacgttgcgccatcctttttgcaatcagtgaccacttttccaagcaaaaataacgccaagcagaacgaagacgttctttttaagaagcgagaacaccagaagttcgtgctgtcggggcatggggcgacgaattggcggataaaggggatctagtccagccttgcaagaagcggatacaggagtgcaaaaaatggctatctctagtaaggcctaccccttaggctttatgcaagtcgacgtgacctgccgtataggcagctgaaaatgagacctctgtcttgtcagctagggtggtctcgtgacctgccgtataggcagctgaaaattagcgaattccgagcgaaggagatatacatatggcttttctattttctcccaaggctcgggcattttctgacgaatcgctggaaagttacttgttacgggtcgtttcagagaatttttttgactcgtatgaagggctcagcttagctattcgcgaagagctgcatgagcttgattttgaggcgcatggtgcattcccagtagatttaaagaggctcaatgtttaccacgccaaacataatagccattttaggatgcgggctttaggactactcgaaacactactagatttacctcgatacgagctacaaaagttggctttgctaaagtcagatattaaatttaactcctccgtcgctttatataacaatggcgtagacattcccctgaggtttattcgtcaccacgccgaggaagctgttgattcgattccggtatgctcacaatgtcttgcagaagaagcctatataaaacaaagttggcatataaagtgggtaaatgcatgcactaaacatcagtgtgctttgctacataactgcccagaatgctacgctccaattaactatatcgagaatgagtcaattactcattgttcatgcggttttgagctgtcttgcgctagtacctcgcctgtaaatacgttaagtattgaacatttaaataaattactggataaaggtgagcgcaacgatagtaacccgctatttaacaatatgactcttacagaacgttttgctgcgcttctttggtatcaggagcggtattctcaaacagataacttttgtttaaatgatgctgtgaactattttagtaaatggccagcagtttttaatacagagcttgatgaactaagtaaaaatgcagaaatgaagttaatagatctgtttaataaaactgagtttaagtttatttttggggatgctattttagcttgccccagtactcaaaagcagagtgaatctcactttatttatagggctctattagattatttagttactttagttgagagtaaccctaaaactaaaaagcccaacgcagccgacttattagtaagtgtattggaggctgcaactttattaggtacttcagtagagcaggtttataggttgtaccaaaatggtattttgcaaacggcatttcgtcataaaatgaaccagcggatcaacccttataagggcgcgttttttttaagacatgttatagagtacaaaaccagttttggaaatgacaaagctagaatgtatttgtcggcatggtgagtatatgcatcttaaggaactgctagagattacagacaccactgagcgggataggtcattacgtcgtgcttttagcccttatacggcaatgattgatataacaggcagcgaagccgttgccctgattattttgttaaacctgacttatcgaaaaaaccaagttgatgacttgctggataaaaagctcgcaaaacaggctttaaaaagtgaagaccatattaataaatgtattaaggaaatagcgtggtttcatactcataatttaaagtaccctgacattagagtcagtaagcaaaatttagccgtagagcctccaacactgcactcttatgttttgagtagtgctaactatcctaaagcctatggctggtcacataactcagctaaagttaattttgctaaattatttgttagttactttaaatggcaaaatcaagtcagttggctggcacaagtattagctacgaactcggataactggaaatccgcatttacctctcttgggttatccgttaaggcatttaaaagtttatgtgtaaccgttaaaaattcattgcctgaagaggccattcccgactctgttgaccgctactctcgccaaattagaatgccttatcatgatggttacttagctgttacgcctgtaattagccatgttgttcaatcaaaaattcaacaggcggcaattgataaacgagcccgatttagcaatgtagagtttacgcgtcctgctgctgtcagtatgttagctgcttccttaggtggtgttattaatgtgcttaattaccctccttatatacgaagtaaatatcatggtttaagtaactcacgagcatttaaattaaataatgggcaaacagtatttaacgttgaggcactattaaagccggaattaattaaagccttagaaggtattatatttagtaataatgcgctggctcttaaacagcgtagacaacaaaaagtaaaaaatattaaagagctgagaaacacgcttttagaatggttttcacctgtatttgaatggcgcttggacgctattgagaatgggtatgacttagaacagcttgagagtgcttcagagcgactagagtataaaatactatcgctacccgacaatgaactcccttcgctaacgattcctttatttaggttactaaatgaaatgcttggcggtgtgagcatgacacaaaggtatgcttttcatcctaaattaatgagccctttaaaagcagctttacaatggttgcttgttaatcttacagatcaaaaacatgtactgattgaagaagatgatgaacattatcgctatcttcatttaagcggtatacgtgtgtttgatgcgcaagcattatcaaacccttactgctcaggtattccatctttaaccgctgtttggggtatgattcacagctaccaaagaaaacttaatgaggcgctaggaacaaatgtacggttcacatccttttcttggtttattaggaattattctgctgtagcaggaaaaaaacttcctgaactgagccttcaaggcgctcagcaaagtaggctcaagcggccaggaattatcgatggcaaatactgtgatttggtatttgatttaataatacacattgatggttatgaagatgacttacaggcagtagatagtaagcctgacattttgaaagcgcattttccatctaactttgcaggtggtgttatgcatcagcctgagcttaactcaaatataaattggtgctgtttatatagtaatgaaaatcagttatttgaaaagttaaggcgactccctttatctggttgttgggttatgccaactgagcacaaaatacaggatttagatgagctactcttattattaaatagtgactctaaactaagcccatctatgatgggatatatgttactcaccgaaccgatggctagagttggatcacttgaaagactgcattgttatgctgaaccagcaataggagtggtgaaatacgaagcggccactagtgtaaggctaaaaggtattggtaactattttaatagcgctttttggatgctagatgcacaagaaaagtttatgctaatgaaaaaagtttaaccggaaaatacttaatggagctctgtaatatattaaaatatgatcgctcgctttaccctggtaaagctgtgtttttttataaaacggctgactctgattttgttccactagaggctgatattaataaaattcgaggccctaaatctggttttactgaagcattcaccccacagttttccccaaaaaacatctcacctcaggacttaacacataataatatattaactctcgaagagtgttatgtacctccaaatgtggagcatatattttgtcggttttctttgagagtacaggctaactcgttggtcccttcaggctgtagtgatccagaggttttttctttattaaaagagttggcagaaacatttaaagaatgcggtggttataaagaactagcagtaagatattgtcgaaatattttgataggtacatggctttggcgtaatcaaaacaccggcaacactcaaattgaaattaaaaccagcaaagggagttgttatttaatcgataacactcgtaagttagcttgggaaagcaaatgggcttctgatgatctaaaagtattggaagagcttagtaatgaaattgagagcgcattaactgatcccaatgtgttttggagtgctgatataaccgcgaaaatagaagcctcattttgccaagagatttacccaagccaaatccttaacgacaaggttaagcaaggagaggcctcaaaacagtttgtaaaagctaagtgtgcagatggccgttacgctgtaagttttaattcagtaaaaataggagcagcccttcagtcaatagatgattggtgggatgaggatgcaagtaaaagattacgagtgcatgagtttggtgctgataaagaaataggggttgcccgacgtcctcctgattctgaacagaatttttattctattttcaaaaatacggaatggtatttgtcagcccttaaaaattgcattactaataaaaatgaaaaaatagacccagctatttattacttattctctgtattgattaagggcggaatgttccagaaaaaagcagaggctaaaaaggcgtaattatgcaaaggtattacttcacagtccactttttaccaaaacaagctaatctagcgctgcttactggccgttgtatttctattatgcatgggtttattttgaagcataatattgaaggaatgggggttacgtttcctgcatggtcggactcatcaattggtaatgaaattgcttttgtttacacggacaaggagattttaaatacccttaaagatcaggcatattttgtggacatgcaagattgtggcttttttaaagtaagccaagttttagctgtacctgacagctgcgaagaagtacgttttatacgtaatcaggcggtagcaaaaattttcacaggtgaaagtagaagaagattaaagcgcctgcaaaaaagagcgttagcaagaggtgaagattttaatcctaaaaagatcgaagctccccgagagattgatattttccatagagtggctatgactagtaagagttcacaagaggattatattctgcatattcaaaagcaagatgttgactgccaagctgagccatactttagtaattatgggcttgcctcaaatgaaaagtttaaaggcacggttccggatttatcaccctcaatagatagaaattaacctttaataaggagatatagcatgtatatacgcaacttgagaaagccatctccaaataaaaatgtatttaaatttgcgagcactaaagttagtagtgtagttatgtgtgagagttcattagagtttgatgcatgttttcatcatgaatataacgatttgatagagagttttgggagtcagcctgaaggctttaaatatgagtttatgggtaaaagtttaccttacacaccagatgcactgatttcatatacagataaaacccaaaaataccacgaatataagccctattctaaaattgcttctccactatttagagctgaatttgctgccaaaagagctgcatcattaaaattggggattgatcttgttttagtaactgataggcaaattagggtaaatccaatattaaacaacttaaagttattacaccgctactcaggtgtttatggtatcagcggcattcaaaaagagttgctcagttttattcataaatcaggggtaatcaagctaaatgatataagctctcaggttgggataccaattggtgaaacacgatcttttttatttgggctcatgcataaagggttggttaaggctgatctagggtgtgatgatttaactaataatccaacattatgggctacaccatgactgacttttttaatgaatttgatgaaagcctggtaccattaaagccacaaacgcccacacaatacgtcaaattagatgatgccaacttaatccagcgtgatttggataccttttcagatacctttaaaaaccaagcactacaaaggtataagctaattagcactatagataaaaaactttcacgcggctggacccaacgaaatttagatcctattttagatgagctttttaaaggaggtgacgtagttcggccaaattggcgaactgttgctcgttggcgcaaaaaatatatcgaaagcaacggtgatatagcctcccttgctgataaaaaccacaaaatgggaaacagaactaaccgtataaaaggggatgataaattttttgataaagcattagaacgatttttagatgctaaaagacctactatagcaactgcatatcagtactataaagaccttattgttattgaaaatgagagtattgtcgaaggcaagattccaataatatcctacaatgcgtttaataaaagaatcaaagcaatacccccatacgcggtcgcggtcgcaaggcatggtaaatttaaagcagaccaatggtttgcttactgcgctgcgcacgtacccccgacaagaatattagagcgtgtagagattgatcatacaccacttgatttaatcctacttgatgatgagttacttattcccataggaagaccttacctaacattacttattgatgtatttagtggctgtgttcttggttttcatcttagttataaatccccttcctacgtatctgctgctaaggctattactcatgcgattaaaccaaagtctcttgatgctctgaatatagaactacaaaatgattggccttgctttggtaaatttgaaaatttagttgtagataatggtgctgagttttggtctaaaaacttagagcatgcttgtcagtcagcaggaataaatatccaatataaccctgtgcgcaagccttggctaaaaccctttatagagcgtttttttggggtgatgaatgaatatttcttacctgaattaccaggaaagacattttcaaatattttagaaaaagaagagtataaacctgagaaagatgcaattatgcgcttctcaacttttgttgaagaatttcaccgctggatcgcggatgtgtatcatcaagacagtaattcacgtgaaactcgaatcccaattaaacgttggcaacaagggtttgatgcatatcccccattgaccatgaatgaagaggaggaaacgcgtttttcaatgttaatgcgcatctcagactcaagaacgttaacgagaaatgggtttaaatatcaagagttaatgtatgactcaacagctttggctgattatcgtaaacattatccgcaaacaaaagaaactgtaaaaaaactgattaaagtagaccctgatgacatctcaaaaatttatgtttatttagaagagttagaaagttatctcgaagtaccgtgtacagatcctaccggctatacggatggtttaagtatctatgagcataaaacaataaaaaaaattaacagggaagtcatacgggaatctaaagatagtttgggcttagcgaaagcacgcatggctattcatgagcgagtaaagcaagagcaagaagttttcattgaatcaaaaactaaagctaagataacagctgttaaaaagcaagctcaaatagctgatgtaagtaatacaggaacgagcactattaaggtttctgaagaaagtgcagcccctgtgcaaaaacatataagtaacgataattctgacgactgggatgatgacttagaggcatttgaatgaatgccttaacagagatacagatagagaagcttcggaactttagcgattgcatcgttatgcacccgcaaattaaaacaatttttaatgactttgatgaattaagattaaaccgtaaatttcagtcagaccaacagtgtatgctattaattggtgatacaggtgttggaaaaagtcataccattaatcactacaaaaaaagagttctagctacacagaattatagtcgaaacactatgccagtcttagtaagtcgtatatctagggggaaaggcttagatgctactttagtccaaatgctggcagatctggagctatttggaagtagtcaaattaaaaagcgaggctacaaaacagaccttactaaaaagctcgtagagagcttaattaaagctcaagtagagctactcatcattaatgagtttcaggagttaatagagtttaaaagcgtacaagaacgacaacaaattgcaaatgggttaaagtttattagtgaagaggccaaagtgccaatagtactggttggtatgccttgggctgcaaaaatagctgaagaacctcaatgggcttctcgcttagttagaaaaagaaaacttgaatactttagcctaaaaaatgacagcaagtactttcgccaatatttgatggggttagctaagaaaatgccatttgatgtacctcctaagctcgaaagtaaaaataccacaatagcgttgtttgctgcatgtcgaggtgagaatcgagcccttaaacatctactgttggaggctttaaaattagcactaagttgtaatgagtatcttgaaaataaacattttattactgcttatgacaagtttgatttttttaatgataaggaaaaactaaaatcaaaaaatccttttaaacaagacattaaagatattgaaatttatgaggtaatcaaaaactcatcttataacccaaatgcattagacccagaagatatgctcacagatcgagtgtttgcaatagtaaagtaacctaggctgctgccaccgctgagcaataactagcataaccccttggggcctctaaacgggtcttgaggggttttttgctgaaacctcaggcatttgagaagcacacggtcacactgcttccggtagtcaataaacgaggaagcggaagagcgtgttgatcggctttaaggatctagtgtcgctgcaaccatagtttgacataatgcaaccataccttgacataattaaagtcatactctgacataaagccccttattaaaaatgatgctaaaaataaattccattataatcaattatttaagaattaattaaaccatagtgtgacatagtggctttttatttgtatagtatgtgtactcaaataataaaaatttacttatgtatatacgcaacttaagaaagccatctccaaataaaaatgtatttaagaggcagtccctcttagaggatcctactaggagcacgtgttgacaattaatcatcggcatagtatatcggcatagtataatacgacaaggtgaggaactaaaccatgaacatcaaaaagtttgcaaaacaagcaacagtattaacctttactaccgcactgctggcaggaggcgcaactcaagcgtttgcgaaagaaacgaaccaaaagccatataaggaaacatacggcatttcccatattacacgccatgatatgctgcaaatccctgaacagcaaaaaaatgaaaaatataaagttcctgagttcgattcgtccacaattaaaaatatctcttctgcaaaaggcctggacgtttgggacagctggccattacaaaacactgacggcactgtcgcaaactatcacggctaccacatcgtctttgcattagccggagatcctaaaaatgcggatgacacatcgatttacatgttctatcaaaaagtcggcgaaacttctattgacagctggaaaaacgctggccgcgtctttaaagacagcgacaaattcgatgcaaatgattctatcctaaaagaccaaacacaagaatggtcaggttcagccacatttacatctgacggaaaaatccgtttattctacactgatttctccggtaaacattacggcaaacaaacactgacaactgcacaagttaacgtatcagcatcagacagctctttgaacatcaacggtgtagaggattataaatcaatctttgacggtgacggaaaaacgtatcaaaatgtacagcagttcatcgatgaaggcaactacagctcaggcgacaaccatacgctgagagatcctcactacgtagaagataaaggccacaaatacttagtatttgaagcaaacactggaactgaagatggctaccaaggcgaagaatctttatttaacaaagcatactatggcaaaagcacatcattcttccgtcaagaaagtcaaaaacttctgcaaagcgataaaaaacgcacggctgagttagcaaacggcgctctcggtatgattgagctaaacgatgattacacactgaaaaaagtgatgaaaccgctgattgcatctaacacagtaacagatgaaattgaacgcgcgaacgtctttaaaatgaacggcaaatggtacctgttcactgactcccgcggatcaaaaatgacgattgacggcattacgtctaacgatatttacatgcttggttatgtttctaattctttaactggcccatacaagccgctgaacaaaactggccttgtgttaaaaatggatcttgatcctaacgatgtaacctttacttactcacacttcgctgtacctcaagcgaaaggaaacaatgtcgtgattacaagctatatgacaaacagaggattctacgcagacaaacaatcaacgtttgcgcctagcttcctgctgaacatcaaaggcaagaaaacatctgttgtcaaagacagcatccttgaacaaggacaattaacagttaacaaataaggaggacaatcatgaaatctaacaatgcgctcatcgtcatcctcggcaccgtcaccctggatgctgtaggcataggcttggttatgccggtactgccgggcctcttgcgggatatcgtccattccgacagcatcgccagtcactatggcgtgctgctagcgctatatgcgttgatgcaatttctatgcgcacccgttctcggagcactgtccgaccgctttggccgccgcccagtcctgctcgcttcgctacttggagccactatcgactacgcgatcatggcgaccacacccgtcctgtggatcctctacgccggacgcatcgtggccggcatcaccggcgccacaggtgcggttgctggcgcctatatcgccgacatcaccgatggggaagatcgggctcgccacttcgggctcatgagcgcttgtttcggcgtgggtatggtggcaggccccgtggccgggggactgttgggcgccatctccttgcatgcaccattccttgcggcggcggtgctcaacggcctcaacctactactgggctgcttcctaatgcaggagtcgcataagggagagcgtcgaccgatgcccttgagagccttcaacccagtcagctccttccggtgggcgcggggcatgactatcgtcgccgcacttatgactgtcttctttatcatgcaactcgtaggacaggtgccggcagcgctctgggtcattttcggcgaggaccgctttcgctggagcgcgacgatgatcggcctgtcgcttgcggtattcggaatcttgcacgccctcgctcaagccttcgtcactggtcccgccaccaaacgtttcggcgagaagcaggccattatcgccggcatggcggccgacgcgctgggctacgtcttgctggcgttcgcgacgcgaggctggatggccttccccattatgattcttctcgcttccggcggcatcgggatgcccgcgttgcaggccatgctgtccaggcaggtagatgacgaccatcagggacagcttcaaggatcgctcgcggctcttaccagcctaacttcgatcactggaccgctgatcgtcacggcgatttatgccgcctcggcgagcacatggaacgggttggcatggattgtaggcgccgccctataccttgtctgcctccccgcgttgcgtcgcggtgcatggagccgggccacctcgacctgatgtccgatcatctgttacgccggcggtagccggccagcctcgcagagcaggattcccgttgagcaccgccaggtgcgaataagggacagtgaagaaggaacacccgctcgcgggtgggcctacttcacctatcctgcccggctgacgccgttggatacaccaaggaaagtctacacgaaccctttggcaaaatcctgtatatcgtgcgaaaaaggatggatataccgaaaaaatcgctataatgaccccgaagcagggttatgcagcggaaaagcgctctttgttgatacaaccataaaatgataattacacccataaattgataattatcacacccataaattgatattgcctcttcatggtctaaacttcagtaagtttacgacattttcctcgaggtcatttccggggatccgcgatcgcttctccttacgcatctgtgcggtatttcaggtaccctgcccaagtcttatgaatgccgtataggcagctgaagataaaaacaatcgattcgatgtttaagttaatgtaattctgccgaaaaggcagtgagtagtaattgaaaaaaccagtcttatatccgggctggtttttttgtttttagcgttataacttttatttcactatgtcactgtatggttgcattttatgtcagtgaatggttgcaggttttttgtaagttattgatatgcctatccagtgtatgtcacgctttgcttgcagcgacatctaggatcttagcgcgcttttatggacgtcaggtggcacttttcccggtaaaccagcaatagacataagcggctatttaacgaccctgccctgaaccgacgaccgggtcatcgtggccggatcttgcggcccctcggcttgaacgaattgttagacattatttgccgactaccttggtgatctcgcctttcacgtagtggacaaattcttccaactgatctgcgcgcgaggccaagcgatcttcttcttgtccaagataagcctgtctagcttcaagtatgacgggctgatactgggccggcaggcgctccattgcccagtcggcagcgacatccttcggcgcgattttgccggttactgcgctgtaccaaatgcgggacaacgtaagcactacatttcgctcatcgccagcccagtcgggcggcgagttccatagcgttaaggtttcatttagcgcctcaaatagatcctgttcaggaaccggatcaaagagttcctccgccgctggacctaccaaggcaacgctatgttctcttgcttttgtcagcaagatagccagatcaatgtcgatcgtggctggctcgaagatacctgcaagaatgtcattgcgctgccattctccaaattgcagttcgcgcttagctggataacgccacggaatgatgtcgtcgtgcacaacaatggtgacttctacagcgcggagaatctcgctctctccaggggaagccgaagtttccaaaaggtcgttgatcaaagctcgccgcgttgtttcatcaagccttacggtcaccgtaaccagcaaatcaatatcactgtgtggcttcaggccgccatccactgcggagccgtacaaatgtacggccagcaacgtcggttcgagatggcgctcgatgacgccaactacctctgatagttgagtcgatacttcggcgatcaccgcttccctcatactcttcctttttcaatattattgaagcatttatcagggttattgtctcatgagcggatacatatttgaatgtatttagaaaaataaacaaatagctagctcactcggtcgctacgctccgggcgtgagactgcggcgg

SEQ ID NO: 40 - DNA, 15683 bp, synthetic construct
  source 1..15683: mol_type = other DNA
actcttcctttttcaatattattgaagcatttatcagggttattgtctcatgagcggatacatatttgaatgtatttagaaaaataaacaaatagctagctcactcggtcgctacgctccgggcgtgagactgcggcgggcgctgcggacacatacaaagttacccacagattccgtggataagcaggggactaacatgtgaggcaaaacagcagggccgcgccggtggcgtttttccataggctccgccctcctgccagagttcacataaacagacgcttttccggtgcatctgtgggagccgtgaggctcaaccatgaatctgacagtacgggcgaaacccgacaggacttaaagatccccaccgtttccggcgggtcgctccctcttgcgctctcctgttccgaccctgccgtttaccggatacctgttccgcctttctcccttacgggaagtgtggcgctttctcatagctcacacactggtatctcggctcggtgtaggtcgttcgctccaagctgggctgtaagcaagaactccccgttcagcccgactgctgcgccttatccggtaactgttcacttgagtccaacccggaaaagcacggtaaaacgccactggcagcagccattggtaactgggagttcgcagaggatttgtttagctaaacacgcggttgctcttgaagtgtgcgccaaagtccggctacactggaaggacagatttggttgctgtgctctgcgaaagccagttaccacggttaagcagttccccaactgacttaaccttcgatcaaaccacctccccaggtggttttttcgtttacagggcaaaagattacgcgcagaaaaaaaggatctcaagaagatcctttgatcttttctactgaaccgctctagatcaagccacttcctttttgcattgacgcagggtgtcggaaggcaactcgccgaacgcgctcctatagttttcagcgaagcgtcccaaatgtaagaagccgtagtctagggctatctcagttatactacgcacattggcactgggatcgttcaagcaggcgcggatgctttcgagcttgcggttgcggatgtagttcttcggcgtggtgccggcgtgcttctcgaacaaattgtagagcgagcgtggactcatcatcgccagctccgctaaccgctcaaggctgatattccgtttgagattctcctcaatgaattgaacgactcgctcgaaagacgggttacctttgctgaaaatttcacggctgacattgctgcccagcatttcgagcagcttggaagcgatgatccccgcatagtgctcttggacccgaggcatcgactttgtatgttccgcttcgtcacaaactaacccgagtagattgataaagccatcgagttgctggagattgtgtcgcgcggcgaaacggataccctccctcggcttgtgccaattgttgtcactgcacgcccgatcaaggaccactgagggcaatttaacgataaatttctcgcaatcttctgaataggtcaggtcggcttggtcatccggattgagcagcaatagttcgcccggcgcaaaatagtgctcctggccatggccacgccacaggcaatggcctttgagtattatttgcagatgataacatgtttctaatccaggcgagattaccctcacgctaccgccgtagctgattcgacacagatcgaggcatccgaagattctgtggtgcagcctgcctgccgggcgcccgcccttgggcaggcgaatagagtgcgtaccgacatactggttaacataatcggagactgcatagggctcggcgtggacgaagatctgacttttctcgttcaataagcaaaaatccatagttcacggttctcttattttaatgtgggctgcttggtgtgatgtagaaaggcgccaagtcgatgaaaatgcatctcgacgtgatgcgtatacgggttacccccattgccacgttgcgccatcctttttgcaatcagtgaccacttttccaagcaaaaataacgccaagcagaacgaagacgttctttttaagaagcgagaacaccagaagttcgtgctgtcggggcatggggcgacgaattggcggataaaggggatctagtccagccttgcaagaagcggatacaggagtgcaaaaaatggctatctctagtaaggcctaccccttaggctttatgcaactagtgtgaactgccgagtaggtagctggaaatgagacctctgtcttgtcagctagggtggtctcgtgaactgccgagtaggtagctggaaattagccaattggaattccgagcgaaggagatatacatatgcattttttagttcaaacaaaactttatcctgatgaggctcttgaaagctatttgctaaggcttgctagggataactcatacgatggctatagtgagcttgctgatattttatggcaatggcttgtagagcaagatcatgatcttgaaggtgcgttgccgttagagctgggtaaagttgatgtttatcatgctaggcaagcgagtagctttagaataagagcgctcaagttggtagctcaattagctgatgtaaacgctggtaatattcttgcgcttgcatggcggcgcagtaattttaaatttggcaacttagtagcagtaagccgtaatgagcagacaattcctcttgagttacttcgcactgataatatacctgtttgcattgaatgcttgtttgaatcttcttacgttccttttcattggcatttaaagccctataagacgtgccataagcataaatcacaattaactacacattgtaaggaatgccataacttaattgattacagagcttctgaggagtttttagagtgcagttgtggttgtaaactaaccaatagtgaacagttaaacgatgcagactttaaaattgcatttgcgcttgcaagtagtaacagccataaaatagtggggttaatatcttggtttgcgaaggttaagcaacttgatgtaagcgatgctgactttaaccgtacttttgttgattactttagtacttggcctgaaagccttactactgaattagatttactcacaaacaatgcgcgcctcaagcaacttaacccttttaataaaactaagttcaactctgtttatggaaatgtgatccgtgatggtcaaatagctgcaacaagtaaccgtaaaaacaaagtacttgatgaactaattaaatattttgttgaattagttgatagtaatcctaaaactaaacatccaaatattgcagatttactgctttgtacttttgataccgcagtattattaaacaccaccacagagcaagtttataggcttcatcaagaaggctttttaaactgcgcttacccacaaaaaaagcacgaacagctcagagctgatagtcatgttttttatttacgccaagtgattgagctacagcaagcattcgcagctgaaacgcctcaaacaaaaaaacaatttatagcgccgtggtaacttatgaacttacaagatgcatttgcgattgaatcacttaaggaaaaaaccacagcacttagaaagttgtttactccatatatgtctcatgttgcggtagatggctttgaagaacaagcgctgactgtgctcattaacctagtttataaacgaagtgagattgatgatttaacaagtacaagaaccgctaaaagtgtattacgtgatgaagtgttactgagtaaatgtattaacgaagttaaatggtttcatactcataatttaaaatatcctgatatacgcgtaagccatcaacgtttaattagtaaggtagtaagtgaagatattgcgggtatttgtagccggtcattacctttaagttttggatggtcgcacaacagtgctgaaattaatcatgcaaagttatttttaacctcatttacttggcaaggtgaagtaacttgtttagcaaatttactaataaatgaggagcctgtttggattaatttaataaggacatacgggtttactaaaaaggcggttttaggcatcgcgggtaaaataaaacagcttttgccagtggcagaactcccattagaagtaagctctttttcaccacaattacaaatgccatttcagcaaagctaccttgcggttacgcctgtagtaagtcacgcaatgctggctaaaattcagcaattaacaacagatcgtaagttaaattttggtttagttgagcactcaagacctgccaatgttggcgatttagcaagctcagtaggtggtaatattagagtgctgcgttactttcctaaaacatattcaaaggctgttaactgctctgaagtattcaataatgatagtgagaaagcatttaaaattcgtgcgctattaaacagtcaatttcaacaggcgcttttggtattggtcggtattaaacagtttaatacgttaaggcaaaagcgattagcgcgagtagcggctattaggcaagtacgtgttagcttgcagttgtggctggataacattctggaagctaaaaataacgctcaagggcaagcctaccctgagtgggcaaagcattacttagatcagagtattactaactgcattagccaatttagtaacgtactaaatgagagccttggtaatttaagtaagctcaaacgctttgcgtatcaccctaatttaatgggggtgtttaaaacgcagttaaactatgtgtttactcactgtattcctgatgaagaaacattaaatgatgagcaaatagtgtatgtgcattgccaagatatgcgagtgtttgatgctgaggcaatggctaatccgtatattcaaggtatgccgtcacttacagctttaaatgggcttgctcataactttgagcgtaagctaaaaaattttatagacccttcaattaagtgtattggtagtgccattaacattgaaagttatcaactacatacaggtaaaccattacctgaaccaagtaagttaaaacaagttgctggccgtagtcatgtcataagatcaggaattatcgataaacctaaatgcgatataacactcgatttagtctttaggctttttgtaccaaacattaagctgttagataagttaaatagtcagcttgtgaaacccgcactaccatctatgtttgcaggcgggactatgcatccaccttcgttataccaaaatattgactggtgccatttacatactaaaccaagtgagctgtttaaaaatataaaggcaaaatcgttaaatggcagttggttgtacccttcaaaaaaagtagtcaaaagttttgaacagttgattgatgcgcttaacggtaactttaatttaagacctgctgccattggttttgctgcgcttgaagaacccataaagcgagatgtagccttacatgaataccattgttatgctgagcccgtaattgggcttttagagtgtgttagcaatacatcagttaagtacgcaggggctaagcagttcttccatgacgcattttgggttatggatgttcaaaaagagtctatgcttatgaaaaagtctaagtttgagtatgaataatgcaattacctcggcatttaagttacacgcgttcgctttcacccagtaaagcggtatttttttataaaacatcggagtctgattttgaaccgctgcaaatagagcaaaataagcttgttgggcaaaagtcagggtttggcgatgcgtatcaaaagcaaaatgtggctaaaaatttagcgccacaagatctagcgtttggaaacccacaaacgattgatgtgtgctacgtacctccagcagtaaatgagctattttgccgtttttcactcagggttgaggctaatagcaatgaaccacacgtttgtgatgaccctaaagttatttattggttaaaacggttttttgaaacctacaaaaaacacaatggtcttaatgaagttgcaactcgctatgctaaaaatatactgatggggaactggctttggcgtaaccgccaatcaccaaatgttgatattgaaatccttactgaacatgcagccccgatcattgttgaaggtgcacaaaaactaaaatggcaaggcaactggcaaaacaatcaaacagcattaataacattatcagaagctattcaagaagggcttagcaatcctcaaaattattgttatttagatataaccgcaaaaattaaaaatgcatttagccaagaggttcaccctagtcaaaagtttgtagacaatgttgaacaaggcatgtcatctaaacaacttgcatacactcaagtcggcgataaaaaagcagccagtttaaactcacaaaaagtaggggctgcgattcaaactattgatgattggtatgagggaggttacaaacctttacgcactcacgagtatggtgcagataagcaaatattagttgcacatagaacgcctaagagccattcagacttttattcattacttccgcgcattgccttgcatattaagcacatggaaaagcatggtttagagcaaagtgaagaatcaaacgcagttcactttattgcagcagtgttgatcaaaggcggcttgttccaaaggagtaaggcatgaagcgctattattttactattacttatttacctaaaaattgtgatgtaagcctccttgcagggcgttgtatcggcatattgcatgggtttatgagttcgcgtgaaattagtaatataggtgtgtgttttcctaaatggaatgagcaagagataggtaatgaattggcgtttgtatcgacagataaaaagcaattaaccaatctatctcagcaaagctattttgagatgatggctcaggataaattatttggcttatcaaaaatactcgaagtaccaacaaaccaaaatgaggttatgtttattcgcaaccaatcagtagctaaggcttttgttggcgaaaagcaaagacgtttaaaacgcgctaaaaaacgagctgaagccagaggtgaagtttataatcctgaatatcaatttgaggcaaaagacataggccattttcattcaatacctgtatcaagcaaagccaacggccaaagttatgttctgcatatacaaaaaattgaaaatactaatgcgacagaaaatcaatttaataattatggctttgctacaaatcaaacatttcaaggtacggttccttctttgaatacccaataacctttaataaggagatatagcatgtacagaagaaaactcaaacactcccgtgttaaaaaccttcataaatttgctagtcaaaaaaataaatctacctgtttagttgaatcctctttagagtttgatgcctgttttcattttgaattttcaccatcaatagccgcatttgaggcacaaccactaggttatgaatatgagtttgataaccgtatttgccgttacacacctgactttttacttacccacacagacggcacgcaaaaatttatagaagtaaaaccgcaaagcaaaattgctgacgaggactttcgtgcacgttttattgaaaagcaaaccatcgctaaacaagatggacgcgacttaatactggttactgataaacaaatccgtgtatacccaacactcaataacttaaaacttttacatcgctattctggttttcagtctttaacagagctgcaagcatcggtgctcgagcttgttaagcaatacggctctattaaagtgggccagttagttaactttttaaaagtaactgccggtgagctacttgctactgtgctacgcttattatcactagggcagttatttgccgacttaactacaaatgaaatatcaatagaaacagcaatttggtctaacaatgtttaatgacggtttgtttgatgatgagtttaaccagccattaccaaaagtagaaaccaaactacctcaaaattacgccaaagatttacaagcccttcctgaaaaaattaaaaatacaacatttgctaaacttaaatatattcaatggcttgaggctaatattcaaggtggctggacacaaaaaaaccttgagcctttattgaaagtaatgcctgaagttgagggtgaaaaaaagcctagctggagaacagctgcacgatggtatagcgcttatacaaatgcagataaaaatatcatggcgctaataccaagccatcaaaaaaagggtaacagggagcgcgatacagccaccgataagttttttgaaaaagcacttgagcgttacttagtaaaagaaaagccatcagtggcttctgcttacaagtattacgcagacttagttatcattgaaaacgacagcgttgtgggcagtgttttaaagcctttaacatacaaagcgtttaaaaatagaatcgataatttaccgcaatacgacgtgatggtttctcgctatggtaagcgtcttgctgatattgcttttaataaagtagaagggcatacacggcctacccgagtactcgaaaaagttgaaattgaccatacaccgcttgatcttattttattagatgatgagctacatatcccgcttggtaggccaacacttaccatgttagtcgatgtgtatagccattgtattgttggcttctactttagcttcagcgagcctagctatgatgcagtaaggcgagcaatgctaaatgcaatgaaacctaaaagtgatgtggcaaaactatacccagatacgataaatgagtggaaatgtgctggcaaaattgaaactctcgttgttgataatggcgctgaattttggagtaacagccttgaacttgcttgtgaagaaattggtattaatactcaatataaccctgttgcaaagccgtggttaaaaccctttgtagaacgtatgtttggcacaattaacactgaattattagaccctgttcctggtaaaaccttttctaacattttacaaaagcatgaatacaatcccaaaaaagatgcaatcatgcgctttacaacctttatgcagctattccataaatgggtagtagacgtttaccatcaagatgccgatagccgctttaagtacatacctagccaactatgggagcaaggctttaatacgttaccgccaacagtgctgagtaatgctgatcttcaacaattagatgttgtgctcagtatttcaaaccatagggtgcttcgtaaaggtggaatacggctagaaaatttaagctacgacagtactgaactagccaactatagaaaacagtttagccataaagtatctcaagaagttttaattaaattaaaccccgatgatatttcttatatatatgtttacctcgataagctagagcattacataaaagtgccatgcatagatccaaacggttacacccaaaatttaagtttgaatcagcataaaataaatatacgtattcatcgcgattttatttccggatctatcgataatgtaggcttagcaaaagcgcgtatgtttattcataataaaattcaaaacgagtttgaagagttaaaaaatgcaccaaaacactcaaaagtaaaagggggtaaagcattagctaagcatcaaaatgtaagtagtgactcacaaaaatcaatagctcagagcgagccattagaacccaaaaaggttacacctaaagagcaaccaacagatagctgggatgactttatttcagacctagatggattttaattatgctgaccgataaacaaaaagcaaaacttaatgaatttcgcgatgtatttattgaatacccaataataactactgtatttaacgactttgacagattaagacttggtaaaggattagcgggcgaaaagccctgcatgctgttaaatggcgatacaggcacaggtaaaacagcactaataaaacagtataaagaacgccatttaccgcaatttattaatggagtgatgaaccaccctgtattagtaagccgcatacctagtaacccgacactagaatctactttagccgagcttcttaaagacttagggcaagtaggtagtacagagcgcaagctgagaataaacggtacgcggttaacgacatcattaataaaatgcctaaaaacgtgtggcacagagcttataattattgatgagtttcaagagctgattgagcacaaccaaggtaaaaagcgccgcgagattgctaatcgattaaaatacattaacgatgaagcgggtgtatcgattgtattggtgggtatgccgtgggcagaaaaaatagcagacgaaccccagtggtcatcgcgtttattagtaaggcggcagctgccttattttaaattatcagaaaacccaaagcattttgtacagttaataattggcctagctaaccgtatgccattcaccgaaaagccaaaattaagtgagcaagcaacagtatttgctttgttctcattgtcaaaaggctgttttagaactcttaaatactttttagatgatgccgtactttatgcattaatggataacgcgaaaaccctcacaaccaagcatctagttaaagcatttggagtactgtttcctgatgtaccaaacctatttaccttgcccgttgcagaaattacagcaagtgaagttgagcgctattcactttataaacttgaaagcgcccaagatgaagatccgtttatagcgactaagtttactgaccaaatgccgattagtcagttgttgaggaagtaacctaggctgctgccaccgctgagcaataactagcataaccccttggggcctctaaacgggtcttgaggggttttttgctgaaacctcaggcatttgagaagcacacggtcacactgcttccggtagtcaataaacgaggaagcggaagagcactgccacccaaattcctcatttggtgttgtttgaagtataagttgacatatttgtactaaaagatggcataaattggaagtataaggtggcatagtctagtatttaaccaaatggttagatggttgactcacatgtacagaagaaaactcaaacactcccgtgttaaaaaccttcataaatttgctagtcaaaaaaataaatctacctgtttagttgaatcctctttagagtttgatgcctgttttcattttgaattttcaccatcaatagccgattagacggacgcaatcttgggatccgagccccaactggggtaacctttgagttctctcagttgggggagcacgtgttgacaattaatcatcggcatagtatatcggcatagtataatacgacaaggtgaggaactaaaccatgtcacatctcgcagaactggttgccagtgcgaaggcggccattagccaggcgtcagatgttgccgcgttagataatgtgcgcgtcgaatatttgggtaaaaaagggcacttaacccttcagatgacgaccctgcgtgagctgccgccagaagagcgtccggcagctggtgcggttatcaacgaagcgaaagagcaggttcagcaggcgctgaatgcgcgtaaagcggaactggaaagcgctgcactgaatgcgcgtctggcggcggaaacgattgatgtctctctgccaggtcgtcgcattgaaaacggcggtctgcatccggttacccgtaccatcgaccgtatcgaaagtttcttcggtgagcttggctttaccgtggcaaccgggccggaaatcgaagacgattatcataacttcgatgctctgaacattcctggtcaccacccggcgcgcgctgaccacgacactttctggtttgacactacccgcctgctgcgtacccagacctctggcgtacagatccgcaccatgaaagcccagcagccaccgattcgtatcatcgcgcctggccgtgtttatcgtaacgactacgaccagactcacacgccgatgttccatcagatggaaggtctgattgttgataccaacatcagctttaccaacctgaaaggcacgctgcacgacttcctgcgtaacttctttgaggaagatttgcagattcgcttccgtccttcctacttcccgtttgccgaaccttctgcagaagtggacgtcatgggtaaaaacggtaaatggctggaagtgctgggctgcgggatggtgcatccgaacgtgttgcgtaacgttggcatcgacccggaagtttactctggtttcggcttcgggatggggatggagcgtctgactatgttgcgttacggcgtcaccgacctgcgttcattcttcgaaaacgatctgcgtttcctcaaacagtttaaataaggaggacaatcatgattgaacaagatggattgcacgcaggttctccggccgcttgggtggagaggctattcggctatgactgggcacaacagacaatcggctgctctgatgccgccgtgttccggctgtcagcgcaggggcgcccggttctttttgtcaagaccgacctgtccggtgccctgaatgaactgcaggacgaggcagcgcggctatcgtggctggccacgacgggcgttccttgcgcagctgtgctcgacgttgtcactgaagcgggaagggactggctgctattgggcgaagtgccggggcaggatctcctgtcatctcaccttgctcctgccgagaaagtatccatcatggctgatgcaatgcggcggctgcatacgcttgatccggctacctgcccattcgaccaccaagcgaaacatcgcatcgagcgagcacgtactcggatggaagccggtcttgtcgatcaggatgatctggacgaagagcatcaggggctcgcgccagccgaactgttcgccaggctcaaggcgcgcatgcccgacggcgaggatctcgtcgtgacccatggcgatgcctgcttgccgaatatcatggtggaaaatggccgcttttctggattcatcgactgtggccggctgggtgtggcggaccgctatcaggacatagcgttggctacccgtgatattgctgaagagcttggcggcgaatgggctgaccgcttcctcgtgctttacggtatcgccgctcccgattcgcagcgcatcgccttctatcgccttcttgacgagttcttctgacctaggctcgagtaatggtttcttagacgtcttgacagctagctcagtcctaggtataatgctagcctgtcaccggatgtgctttccggtctgatgagtccgtgaggacgaaacagcctctacaaataattttgtttaatactagagaaagaggggaaatactagatggtgtcgaaaggtgaggagcttttcacgggggtggttccaatcttagtcgagcttgatggtgacgtgaatggccataagtttagcgtgcgcggcgagggtgagggcgatgcgacgaacggtaaacttactttaaagtttatttgtactacaggcaaattaccggtcccgtggccgaccctggtcactacgcttgggtatggggtagcatgttttgcccgttaccctgaccacatgaaacagcacgatttctttaaatctgccatgcccgaagggtatgttcaggagcgcactatcagttttaaagacgacggaacgtacaaaactcgtgctgaagtaaagttcgaaggtgatacccttgtgaaccgtatcgtccttaaaggcatcgacttcaaagaggacggtaacattttaggccacaaattagagtacaacttcaattcacataaggtttatatcacagcagataagcaaaaaaatggcatcaaggcaaattttaagacccgccacaacgtagaagatggtggagtccagttggcggaccactaccagcaaaatacaccgattggcgatggtccggttttgcttcccgacaatcactatcttagccaccagagtaaactgagtaaggacccaaatgaaaagcgcgaccacatggtattgaaagagcgcgttacagcagctggaattacacacgatatggacgaactttataagtaatagggataacagggtaatcgcaaaaaaccccgcttcggcggggttttttcgcgtttaaacgtgccagggcgtgcccttgggctccccgggcgcgttttttacgcgttctagagtccttactgcagtagttttgctgaaatactcgattcacaaaaatatcaacttatggttgttttgtgagatatcaatatatggttgttttgtggttaagttgctgattataaataattattaaatatcactttatggttgcatcaacaggtaccgagctctcatctgttacgctcggcgtgtagccggccagcctcgcagagcaggattcccgttgagcaccgccaggtgcgaataagggacagtgaagaaggaacacccgctcgcgggtgggcctacttcacctatcctgcccggctgatcgccgttggatacaccaaggaaagtctacacgaaccctttggcaaaatcctgtatatcgtgcgaaaaaggatggatataccgaaaaaatcgctataatgaccccgaagcagggttatgcagcggaaaagcgcttatcagcggtaccggtagctcggctgtgaatgaaatggacttaccaattaaagtaaaaggtgatgatttattcatcaaagtttttgtgccagtgtaaaccattttccaaactgtttaagagtgatttacaacgcgtagcatgtttactttgcgttttataaagctgtatttggtagctttatgccatctattgcttcaatactatgccaatatacacttcacttaccacgctgtaagttaataaaaccgagtttggttatgtcaacttatacttcaaacaacatttgggtgaaaatacattcctttttgacgtcaggtggcacttttcccggtaaaccagcaatagacataagcggctatttaacgaccctgccctgaaccgacgaccgggtcatcgtggccggatcttgcggcccctcggcttgaacgaattgttagacattatttgccgactaccttggtgatctcgcctttcacgtagtggacaaattcttccaactgatctgcgcgcgaggccaagcgatcttcttcttgtccaagataagcctgtctagcttcaagtatgacgggctgatactgggccggcaggcgctccattgcccagtcggcagcgacatccttcggcgcgattttgccggttactgcgctgtaccaaatgcgggacaacgtaagcactacatttcgctcatcgccagcccagtcgggcggcgagttccatagcgttaaggtttcatttagcgcctcaaatagatcctgttcaggaaccggatcaaagagttcctccgccgctggacctaccaaggcaacgctatgttctcttgcttttgtcagcaagatagccagatcaatgtcgatcgtggctggctcgaagatacctgcaagaatgtcattgcgctgccattctccaaattgcagttcgcgcttagctggataacgccacggaatgatgtcgtcgtgcacaacaatggtgacttctacagcgcggagaatctcgctctctccaggggaagccgaagtttccaaaaggtcgttgatcaaagctcgccgcgttgtttcatcaagccttacggtcaccgtaaccagcaaatcaatatcactgtgtggcttcaggccgccatccactgcggagccgtacaaatgtacggccagcaacgtcggttcgagatggcgctcgatgacgccaactacctctgatagttgagtcgatacttcggcgatcaccgcttccctcat

SEQ ID NO: 41 - DNA, 15655 bp, synthetic construct
  source 1..15655: mol_type = other DNA
gcgctgcggacacatacaaagttacccacagattccgtggataagcaggggactaacatgtgaggcaaaacagcagggccgcgccggtggcgtttttccataggctccgccctcctgccagagttcacataaacagacgcttttccggtgcatctgtgggagccgtgaggctcaaccatgaatctgacagtacgggcgaaacccgacaggacttaaagatccccaccgtttccggcgggtcgctccctcttgcgctctcctgttccgaccctgccgtttaccggatacctgttccgcctttctcccttacgggaagtgtggcgctttctcatagctcacacactggtatctcggctcggtgtaggtcgttcgctccaagctgggctgtaagcaagaactccccgttcagcccgactgctgcgccttatccggtaactgttcacttgagtccaacccggaaaagcacggtaaaacgccactggcagcagccattggtaactgggagttcgcagaggatttgtttagctaaacacgcggttgctcttgaagtgtgcgccaaagtccggctacactggaaggacagatttggttgctgtgctctgcgaaagccagttaccacggttaagcagttccccaactgacttaaccttcgatcaaaccacctccccaggtggttttttcgtttacagggcaaaagattacgcgcagaaaaaaaggatctcaagaagatcctttgatcttttctactgaaccgctctagatcaagccacttcctttttgcattgacgcagggtgtcggaaggcaactcgccgaacgcgctcctatagttttcagcgaagcgtcccaaatgtaagaagccgtagtctagggctatctcagttatactacgcacattggcactgggatcgttcaagcaggcgcggatgctttcgagcttgcggttgcggatgtagttcttcggcgtggtgccggcgtgcttctcgaacaaattgtagagcgagcgtggactcatcatcgccagctccgctaaccgctcaaggctgatattccgtttgagattctcctcaatgaattgaacgactcgctcgaaagacgggttacctttgctgaaaatttcacggctgacattgctgcccagcatttcgagcagcttggaagcgatgatccccgcatagtgctcttggacccgaggcatcgactttgtatgttccgcttcgtcacaaactaacccgagtagattgataaagccatcgagttgctggagattgtgtcgcgcggcgaaacggataccctccctcggcttgtgccaattgttgtcactgcacgcccgatcaaggaccactgagggcaatttaacgataaatttctcgcaatcttctgaataggtcaggtcggcttggtcatccggattgagcagcaatagttcgcccggcgcaaaatagtgctcctggccatggccacgccacaggcaatggcctttgagtattatttgcagatgataacatgtttctaatccaggcgagattaccctcacgctaccgccgtagctgattcgacacagatcgaggcatccgaagattctgtggtgcagcctgcctgccgggcgcccgcccttgggcaggcgaatagagtgcgtaccgacatactggttaacataatcggagactgcatagggctcggcgtggacgaagatctgacttttctcgttcaataagcaaaaatccatagttcacggttctcttattttaatgtgggctgcttggtgtgatgtagaaaggcgccaagtcgatgaaaatgcatctcgacgtgatgcgtatacgggttacccccattgccacgttgcgccatcctttttgcaatcagtgaccacttttccaagcaaaaataacgccaagcagaacgaagacgttctttttaagaagcgagaacaccagaagttcgtgctgtcggggcatggggcgacgaattggcggataaaggggatctagtccagccttgcaagaagcggatacaggagtgcaaaaaatggctatctctagtaaggcctaccccttaggctttatgcaagtcgacgtgacctgccgtataggcagctgaaaattggcggcctgtcagagctacgtcaaagaaatcgtgacctgccgtataggcagctgaaaattagcgaattccgagcgaaggagatatacatatggcttttctattttctcccaaggctcgggcattttctgacgaatcgctggaaagttacttgttacgggtcgtttcagagaatttttttgactcgtatgaagggctcagcttagctattcgcgaagagctgcatgagcttgattttgaggcgcatggtgcattcccagtagatttaaagaggctcaatgtttaccacgccaaacataatagccattttaggatgcgggctttaggactactcgaaacactactagatttacctcgatacgagctacaaaagttggctttgctaaagtcagatattaaatttaactcctccgtcgctttatataacaatggcgtagacattcccctgaggtttattcgtcaccacgccgaggaagctgttgattcgattccggtatgctcacaatgtcttgcagaagaagcctatataaaacaaagttggcatataaagtgggtaaatgcatgcactaaacatcagtgtgctttgctacataactgcccagaatgctacgctccaattaactatatcgagaatgagtcaattactcattgttcatgcggttttgagctgtcttgcgctagtacctcgcctgtaaatacgttaagtattgaacatttaaataaattactggataaaggtgagcgcaacgatagtaacccgctatttaacaatatgactcttacagaacgttttgctgcgcttctttggtatcaggagcggtattctcaaacagataacttttgtttaaatgatgctgtgaactattttagtaaatggccagcagtttttaatacagagcttgatgaactaagtaaaaatgcagaaatgaagttaatagatctgtttaataaaactgagtttaagtttatttttggggatgctattttagcttgccccagtactcaaaagcagagtgaatctcactttatttatagggctctattagattatttagttactttagttgagagtaaccctaaaactaaaaagcccaacgcagccgacttattagtaagtgtattggaggctgcaactttattaggtacttcagtagagcaggtttataggttgtaccaaaatggtattttgcaaacggcatttcgtcataaaatgaaccagcggatcaacccttataagggcgcgttttttttaagacatgttatagagtacaaaaccagttttggaaatgacaaagctagaatgtatttgtcggcatggtgagtatatgcatcttaaggaactgctagagattacagacaccactgagcgggataggtcattacgtcgtgcttttagcccttatacggcaatgattgatataacaggcagcgaagccgttgccctgattattttgttaaacctgacttatcgaaaaaaccaagttgatgacttgctggataaaaagctcgcaaaacaggctttaaaaagtgaagaccatattaataaatgtattaaggaaatagcgtggtttcatactcataatttaaagtaccctgacattagagtcagtaagcaaaatttagccgtagagcctccaacactgcactcttatgttttgagtagtgctaactatcctaaagcctatggctggtcacataactcagctaaagttaattttgctaaattatttgttagttactttaaatggcaaaatcaagtcagttggctggcacaagtattagctacgaactcggataactggaaatccgcatttacctctcttgggttatccgttaaggcatttaaaagtttatgtgtaaccgttaaaaattcattgcctgaagaggccattcccgactctgttgaccgctactctcgccaaattagaatgccttatcatgatggttacttagctgttacgcctgtaattagccatgttgttcaatcaaaaattcaacaggcggcaattgataaacgagcccgatttagcaatgtagagtttacgcgtcctgctgctgtcagtatgttagctgcttccttaggtggtgttattaatgtgcttaattaccctccttatatacgaagtaaatatcatggtttaagtaactcacgagcatttaaattaaataatgggcaaacagtatttaacgttgaggcactattaaagccggaattaattaaagccttagaaggtattatatttagtaataatgcgctggctcttaaacagcgtagacaacaaaaagtaaaaaatattaaagagctgagaaacacgcttttagaatggttttcacctgtatttgaatggcgcttggacgctattgagaatgggtatgacttagaacagcttgagagtgcttcagagcgactagagtataaaatactatcgctacccgacaatgaactcccttcgctaacgattcctttatttaggttactaaatgaaatgcttggcggtgtgagcatgacacaaaggtatgcttttcatcctaaattaatgagccctttaaaagcagctttacaatggttgcttgttaatcttacagatcaaaaacatgtactgattgaagaagatgatgaacattatcgctatcttcatttaagcggtatacgtgtgtttgatgcgcaagcattatcaaacccttactgctcaggtattccatctttaaccgctgtttggggtatgattcacagctaccaaagaaaacttaatgaggcgctaggaacaaatgtacggttcacatccttttcttggtttattaggaattattctgctgtagcaggaaaaaaacttcctgaactgagccttcaaggcgctcagcaaagtaggctcaagcggccaggaattatcgatggcaaatactgtgatttggtatttgatttaataatacacattgatggttatgaagatgacttacaggcagtagatagtaagcctgacattttgaaagcgcattttccatctaactttgcaggtggtgttatgcatcagcctgagcttaactcaaatataaattggtgctgtttatatagtaatgaaaatcagttatttgaaaagttaaggcgactccctttatctggttgttgggttatgccaactgagcacaaaatacaggatttagatgagctactcttattattaaatagtgactctaaactaagcccatctatgatgggatatatgttactcaccgaaccgatggctagagttggatcacttgaaagactgcattgttatgctgaaccagcaataggagtggtgaaatacgaagcggccactagtgtaaggctaaaaggtattggtaactattttaatagcgctttttggatgctagatgcacaagaaaagtttatgctaatgaaaaaagtttaaccggaaaatacttaatggagctctgtaatatattaaaatatgatcgctcgctttaccctggtaaagctgtgtttttttataaaacggctgactctgattttgttccactagaggctgatattaataaaattcgaggccctaaatctggttttactgaagcattcaccccacagttttccccaaaaaacatctcacctcaggacttaacacataataatatattaactctcgaagagtgttatgtacctccaaatgtggagcatatattttgtcggttttctttgagagtacaggctaactcgttggtcccttcaggctgtagtgatccagaggttttttctttattaaaagagttggcagaaacatttaaagaatgcggtggttataaagaactagcagtaagatattgtcgaaatattttgataggtacatggctttggcgtaatcaaaacaccggcaacactcaaattgaaattaaaaccagcaaagggagttgttatttaatcgataacactcgtaagttagcttgggaaagcaaatgggcttctgatgatctaaaagtattggaagagcttagtaatgaaattgagagcgcattaactgatcccaatgtgttttggagtgctgatataaccgcgaaaatagaagcctcattttgccaagagatttacccaagccaaatccttaacgacaaggttaagcaaggagaggcctcaaaacagtttgtaaaagctaagtgtgcagatggccgttacgctgtaagttttaattcagtaaaaataggagcagcccttcagtcaatagatgattggtgggatgaggatgcaagtaaaagattacgagtgcatgagtttggtgctgataaagaaataggggttgcccgacgtcctcctgattctgaacagaatttttattctattttcaaaaatacggaatggtatttgtcagcccttaaaaattgcattactaataaaaatgaaaaaatagacccagctatttattacttattctctgtattgattaagggcggaatgttccagaaaaaagcagaggctaaaaaggcgtaattatgcaaaggtattacttcacagtccactttttaccaaaacaagctaatctagcgctgcttactggccgttgtatttctattatgcatgggtttattttgaagcataatattgaaggaatgggggttacgtttcctgcatggtcggactcatcaattggtaatgaaattgcttttgtttacacggacaaggagattttaaatacccttaaagatcaggcatattttgtggacatgcaagattgtggcttttttaaagtaagccaagttttagctgtacctgacagctgcgaagaagtacgttttatacgtaatcaggcggtagcaaaaattttcacaggtgaaagtagaagaagattaaagcgcctgcaaaaaagagcgttagcaagaggtgaagattttaatcctaaaaagatcgaagctccccgagagattgatattttccatagagtggctatgactagtaagagttcacaagaggattatattctgcatattcaaaagcaagatgttgactgccaagctgagccatactttagtaattatgggcttgcctcaaatgaaaagtttaaaggcacggttccggatttatcaccctcaatagatagaaattaacctttaataaggagatatagcatgtatatacgcaacttgagaaagccatctccaaataaaaatgtatttaaatttgcgagcactaaagttagtagtgtagttatgtgtgagagttcattagagtttgatgcatgttttcatcatgaatataacgatttgatagagagttttgggagtcagcctgaaggctttaaatatgagtttatgggtaaaagtttaccttacacaccagatgcactgatttcatatacagataaaacccaaaaataccacgaatataagccctattctaaaattgcttctccactatttagagctgaatttgctgccaaaagagctgcatcattaaaattggggattgatcttgttttagtaactgataggcaaattagggtaaatccaatattaaacaacttaaagttattacaccgctactcaggtgtttatggtatcagcggcattcaaaaagagttgctcagttttattcataaatcaggggtaatcaagctaaatgatataagctctcaggttgggataccaattggtgaaacacgatcttttttatttgggctcatgcataaagggttggttaaggctgatctagggtgtgatgatttaactaataatccaacattatgggctacaccatgactgacttttttaatgaatttgatgaaagcctggtaccattaaagccacaaacgcccacacaatacgtcaaattagatgatgccaacttaatccagcgtgatttggataccttttcagatacctttaaaaaccaagcactacaaaggtataagctaattagcactatagataaaaaactttcacgcggctggacccaacgaaatttagatcctattttagatgagctttttaaaggaggtgacgtagttcggccaaattggcgaactgttgctcgttggcgcaaaaaatatatcgaaagcaacggtgatatagcctcccttgctgataaaaaccacaaaatgggaaacagaactaaccgtataaaaggggatgataaattttttgataaagcattagaacgatttttagatgctaaaagacctactatagcaactgcatatcagtactataaagaccttattgttattgaaaatgagagtattgtcgaaggcaagattccaataatatcctacaatgcgtttaataaaagaatcaaagcaatacccccatacgcggtcgcggtcgcaaggcatggtaaatttaaagcagaccaatggtttgcttactgcgctgcgcacgtacccccgacaagaatattagagcgtgtagagattgatcatacaccacttgatttaatcctacttgatgatgagttacttattcccataggaagaccttacctaacattacttattgatgtatttagtggctgtgttcttggttttcatcttagttataaatccccttcctacgtatctgctgctaaggctattactcatgcgattaaaccaaagtctcttgatgctctgaatatagaactacaaaatgattggccttgctttggtaaatttgaaaatttagttgtagataatggtgctgagttttggtctaaaaacttagagcatgcttgtcagtcagcaggaataaatatccaatataaccctgtgcgcaagccttggctaaaaccctttatagagcgtttttttggggtgatgaatgaatatttcttacctgaattaccaggaaagacattttcaaatattttagaaaaagaagagtataaacctgagaaagatgcaattatgcgcttctcaacttttgttgaagaatttcaccgctggatcgcggatgtgtatcatcaagacagtaattcacgtgaaactcgaatcccaattaaacgttggcaacaagggtttgatgcatatcccccattgaccatgaatgaagaggaggaaacgcgtttttcaatgttaatgcgcatctcagactcaagaacgttaacgagaaatgggtttaaatatcaagagttaatgtatgactcaacagctttggctgattatcgtaaacattatccgcaaacaaaagaaactgtaaaaaaactgattaaagtagaccctgatgacatctcaaaaatttatgtttatttagaagagttagaaagttatctcgaagtaccgtgtacagatcctaccggctatacggatggtttaagtatctatgagcataaaacaataaaaaaaattaacagggaagtcatacgggaatctaaagatagtttgggcttagcgaaagcacgcatggctattcatgagcgagtaaagcaagagcaagaagttttcattgaatcaaaaactaaagctaagataacagctgttaaaaagcaagctcaaatagctgatgtaagtaatacaggaacgagcactattaaggtttctgaagaaagtgcagcccctgtgcaaaaacatataagtaacgataattctgacgactgggatgatgacttagaggcatttgaatgaatgccttaacagagatacagatagagaagcttcggaactttagcgattgcatcgttatgcacccgcaaattaaaacaatttttaatgactttgatgaattaagattaaaccgtaaatttcagtcagaccaacagtgtatgctattaattggtgatacaggtgttggaaaaagtcataccattaatcactacaaaaaaagagttctagctacacagaattatagtcgaaacactatgccagtcttagtaagtcgtatatctagggggaaaggcttagatgctactttagtccaaatgctggcagatctggagctatttggaagtagtcaaattaaaaagcgaggctacaaaacagaccttactaaaaagctcgtagagagcttaattaaagctcaagtagagctactcatcattaatgagtttcaggagttaatagagtttaaaagcgtacaagaacgacaacaaattgcaaatgggttaaagtttattagtgaagaggccaaagtgccaatagtactggttggtatgccttgggctgcaaaaatagctgaagaacctcaatgggcttctcgcttagttagaaaaagaaaacttgaatactttagcctaaaaaatgacagcaagtactttcgccaatatttgatggggttagctaagaaaatgccatttgatgtacctcctaagctcgaaagtaaaaataccacaatagcgttgtttgctgcatgtcgaggtgagaatcgagcccttaaacatctactgttggaggctttaaaattagcactaagttgtaatgagtatcttgaaaataaacattttattactgcttatgacaagtttgatttttttaatgataaggaaaaactaaaatcaaaaaatccttttaaacaagacattaaagatattgaaatttatgaggtaatcaaaaactcatcttataacccaaatgcattagacccagaagatatgctcacagatcgagtgtttgcaatagtaaagtaacctaggctgctgccaccgctgagcaataactagcataaccccttggggcctctaaacgggtcttgaggggttttttgctgaaacctcaggcatttgagaagcacacggtcacactgcttccggtagtcaataaacgaggaagcggaagagcgtgttgatcggctttaaggatctagtgtcgctgcaaccatagtttgacataatgcaaccataccttgacataattaaagtcatactctgacataaagccccttattaaaaatgatgctaaaaataaattccattataatcaattatttaagaattaattaaaccatagtgtgacatagtggctttttatttgtatagtatgtgtactcaaataataaaaatttacttatgtatatacgcaacttaagaaagccatctccaaataaaaatgtatttaagaggcagtccctcttagaggatcctactaggagcacgtgttgacaattaatcatcggcatagtatatcggcatagtataatacgacaaggtgaggaactaaaccatgaacatcaaaaagtttgcaaaacaagcaacagtattaacctttactaccgcactgctggcaggaggcgcaactcaagcgtttgcgaaagaaacgaaccaaaagccatataaggaaacatacggcatttcccatattacacgccatgatatgctgcaaatccctgaacagcaaaaaaatgaaaaatataaagttcctgagttcgattcgtccacaattaaaaatatctcttctgcaaaaggcctggacgtttgggacagctggccattacaaaacactgacggcactgtcgcaaactatcacggctaccacatcgtctttgcattagccggagatcctaaaaatgcggatgacacatcgatttacatgttctatcaaaaagtcggcgaaacttctattgacagctggaaaaacgctggccgcgtctttaaagacagcgacaaattcgatgcaaatgattctatcctaaaagaccaaacacaagaatggtcaggttcagccacatttacatctgacggaaaaatccgtttattctacactgatttctccggtaaacattacggcaaacaaacactgacaactgcacaagttaacgtatcagcatcagacagctctttgaacatcaacggtgtagaggattataaatcaatctttgacggtgacggaaaaacgtatcaaaatgtacagcagttcatcgatgaaggcaactacagctcaggcgacaaccatacgctgagagatcctcactacgtagaagataaaggccacaaatacttagtatttgaagcaaacactggaactgaagatggctaccaaggcgaagaatctttatttaacaaagcatactatggcaaaagcacatcattcttccgtcaagaaagtcaaaaacttctgcaaagcgataaaaaacgcacggctgagttagcaaacggcgctctcggtatgattgagctaaacgatgattacacactgaaaaaagtgatgaaaccgctgattgcatctaacacagtaacagatgaaattgaacgcgcgaacgtctttaaaatgaacggcaaatggtacctgttcactgactcccgcggatcaaaaatgacgattgacggcattacgtctaacgatatttacatgcttggttatgtttctaattctttaactggcccatacaagccgctgaacaaaactggccttgtgttaaaaatggatcttgatcctaacgatgtaacctttacttactcacacttcgctgtacctcaagcgaaaggaaacaatgtcgtgattacaagctatatgacaaacagaggattctacgcagacaaacaatcaacgtttgcgcctagcttcctgctgaacatcaaaggcaagaaaacatctgttgtcaaagacagcatccttgaacaaggacaattaacagttaacaaataaggaggacaatcatgaaatctaacaatgcgctcatcgtcatcctcggcaccgtcaccctggatgctgtaggcataggcttggttatgccggtactgccgggcctcttgcgggatatcgtccattccgacagcatcgccagtcactatggcgtgctgctagcgctatatgcgttgatgcaatttctatgcgcacccgttctcggagcactgtccgaccgctttggccgccgcccagtcctgctcgcttcgctacttggagccactatcgactacgcgatcatggcgaccacacccgtcctgtggatcctctacgccggacgcatcgtggccggcatcaccggcgccacaggtgcggttgctggcgcctatatcgccgacatcaccgatggggaagatcgggctcgccacttcgggctcatgagcgcttgtttcggcgtgggtatggtggcaggccccgtggccgggggactgttgggcgccatctccttgcatgcaccattccttgcggcggcggtgctcaacggcctcaacctactactgggctgcttcctaatgcaggagtcgcataagggagagcgtcgaccgatgcccttgagagccttcaacccagtcagctccttccggtgggcgcggggcatgactatcgtcgccgcacttatgactgtcttctttatcatgcaactcgtaggacaggtgccggcagcgctctgggtcattttcggcgaggaccgctttcgctggagcgcgacgatgatcggcctgtcgcttgcggtattcggaatcttgcacgccctcgctcaagccttcgtcactggtcccgccaccaaacgtttcggcgagaagcaggccattatcgccggcatggcggccgacgcgctgggctacgtcttgctggcgttcgcgacgcgaggctggatggccttccccattatgattcttctcgcttccggcggcatcgggatgcccgcgttgcaggccatgctgtccaggcaggtagatgacgaccatcagggacagcttcaaggatcgctcgcggctcttaccagcctaacttcgatcactggaccgctgatcgtcacggcgatttatgccgcctcggcgagcacatggaacgggttggcatggattgtaggcgccgccctataccttgtctgcctccccgcgttgcgtcgcggtgcatggagccgggccacctcgacctgatgtccgatcatctgttacgccggcggtagccggccagcctcgcagagcaggattcccgttgagcaccgccaggtgcgaataagggacagtgaagaaggaacacccgctcgcgggtgggcctacttcacctatcctgcccggctgacgccgttggatacaccaaggaaagtctacacgaaccctttggcaaaatcctgtatatcgtgcgaaaaaggatggatataccgaaaaaatcgctataatgaccccgaagcagggttatgcagcggaaaagcgctctttgttgatacaaccataaaatgataattacacccataaattgataattatcacacccataaattgatattgcctcttcatggtctaaacttcagtaagtttacgacattttcctcgaggtcatttccggggatccgcgatcgcttctccttacgcatctgtgcggtatttcaggtaccctgcccaagtcttatgaatgccgtataggcagctgaagataaaaacaatcgattcgatgtttaagttaatgtaattctgccgaaaaggcagtgagtagtaattgaaaaaaccagtcttatatccgggctggtttttttgtttttagcgttataacttttatttcactatgtcactgtatggttgcattttatgtcagtgaatggttgcaggttttttgtaagttattgatatgcctatccagtgtatgtcacgctttgcttgcagcgacatctaggatcttagcgcgcttttatggacgtcaggtggcacttttcccggtaaaccagcaatagacataagcggctatttaacgaccctgccctgaaccgacgaccgggtcatcgtggccggatcttgcggcccctcggcttgaacgaattgttagacattatttgccgactaccttggtgatctcgcctttcacgtagtggacaaattcttccaactgatctgcgcgcgaggccaagcgatcttcttcttgtccaagataagcctgtctagcttcaagtatgacgggctgatactgggccggcaggcgctccattgcccagtcggcagcgacatccttcggcgcgattttgccggttactgcgctgtaccaaatgcgggacaacgtaagcactacatttcgctcatcgccagcccagtcgggcggcgagttccatagcgttaaggtttcatttagcgcctcaaatagatcctgttcaggaaccggatcaaagagttcctccgccgctggacctaccaaggcaacgctatgttctcttgcttttgtcagcaagatagccagatcaatgtcgatcgtggctggctcgaagatacctgcaagaatgtcattgcgctgccattctccaaattgcagttcgcgcttagctggataacgccacggaatgatgtcgtcgtgcacaacaatggtgacttctacagcgcggagaatctcgctctctccaggggaagccgaagtttccaaaaggtcgttgatcaaagctcgccgcgttgtttcatcaagccttacggtcaccgtaaccagcaaatcaatatcactgtgtggcttcaggccgccatccactgcggagccgtacaaatgtacggccagcaacgtcggttcgagatggcgctcgatgacgccaactacctctgatagttgagtcgatacttcggcgatcaccgcttccctcatactcttcctttttcaatattattgaagcatttatcagggttattgtctcatgagcggatacatatttgaatgtatttagaaaaataaacaaatagctagctcactcggtcgctacgctccgggcgtgagactgcggcgg

SEQ ID NO: 42 - DNA, 15683 bp, synthetic construct
  source 1..15683: mol_type = other DNA
actcttcctttttcaatattattgaagcatttatcagggttattgtctcatgagcggatacatatttgaatgtatttagaaaaataaacaaatagctagctcactcggtcgctacgctccgggcgtgagactgcggcgggcgctgcggacacatacaaagttacccacagattccgtggataagcaggggactaacatgtgaggcaaaacagcagggccgcgccggtggcgtttttccataggctccgccctcctgccagagttcacataaacagacgcttttccggtgcatctgtgggagccgtgaggctcaaccatgaatctgacagtacgggcgaaacccgacaggacttaaagatccccaccgtttccggcgggtcgctccctcttgcgctctcctgttccgaccctgccgtttaccggatacctgttccgcctttctcccttacgggaagtgtggcgctttctcatagctcacacactggtatctcggctcggtgtaggtcgttcgctccaagctgggctgtaagcaagaactccccgttcagcccgactgctgcgccttatccggtaactgttcacttgagtccaacccggaaaagcacggtaaaacgccactggcagcagccattggtaactgggagttcgcagaggatttgtttagctaaacacgcggttgctcttgaagtgtgcgccaaagtccggctacactggaaggacagatttggttgctgtgctctgcgaaagccagttaccacggttaagcagttccccaactgacttaaccttcgatcaaaccacctccccaggtggttttttcgtttacagggcaaaagattacgcgcagaaaaaaaggatctcaagaagatcctttgatcttttctactgaaccgctctagatcaagccacttcctttttgcattgacgcagggtgtcggaaggcaactcgccgaacgcgctcctatagttttcagcgaagcgtcccaaatgtaagaagccgtagtctagggctatctcagttatactacgcacattggcactgggatcgttcaagcaggcgcggatgctttcgagcttgcggttgcggatgtagttcttcggcgtggtgccggcgtgcttctcgaacaaattgtagagcgagcgtggactcatcatcgccagctccgctaaccgctcaaggctgatattccgtttgagattctcctcaatgaattgaacgactcgctcgaaagacgggttacctttgctgaaaatttcacggctgacattgctgcccagcatttcgagcagcttggaagcgatgatccccgcatagtgctcttggacccgaggcatcgactttgtatgttccgcttcgtcacaaactaacccgagtagattgataaagccatcgagttgctggagattgtgtcgcgcggcgaaacggataccctccctcggcttgtgccaattgttgtcactgcacgcccgatcaaggaccactgagggcaatttaacgataaatttctcgcaatcttctgaataggtcaggtcggcttggtcatccggattgagcagcaatagttcgcccggcgcaaaatagtgctcctggccatggccacgccacaggcaatggcctttgagtattatttgcagatgataacatgtttctaatccaggcgagattaccctcacgctaccgccgtagctgattcgacacagatcgaggcatccgaagattctgtggtgcagcctgcctgccgggcgcccgcccttgggcaggcgaatagagtgcgtaccgacatactggttaacataatcggagactgcatagggctcggcgtggacgaagatctgacttttctcgttcaataagcaaaaatccatagttcacggttctcttattttaatgtgggctgcttggtgtgatgtagaaaggcgccaagtcgatgaaaatgcatctcgacgtgatgcgtatacgggttacccccattgccacgttgcgccatcctttttgcaatcagtgaccacttttccaagcaaaaataacgccaagcagaacgaagacgttctttttaagaagcgagaacaccagaagttcgtgctgtcggggcatggggcgacgaattggcggataaaggggatctagtccagccttgcaagaagcggatacaggagtgcaaaaaatggctatctctagtaaggcctaccccttaggctttatgcaactagtgtgaactgccgagtaggtagctggaaatttccatcgcgcgttcaagaaatggaccggcgagtgaactgccgagtaggtagctggaaattagccaattggaattccgagcgaaggagatatacatatgcattttttagttcaaacaaaactttatcctgatgaggctcttgaaagctatttgctaaggcttgctagggataactcatacgatggctatagtgagcttgctgatattttatggcaatggcttgtagagcaagatcatgatcttgaaggtgcgttgccgttagagctgggtaaagttgatgtttatcatgctaggcaagcgagtagctttagaataagagcgctcaagttggtagctcaattagctgatgtaaacgctggtaatattcttgcgcttgcatggcggcgcagtaattttaaatttggcaacttagtagcagtaagccgtaatgagcagacaattcctcttgagttacttcgcactgataatatacctgtttgcattgaatgcttgtttgaatcttcttacgttccttttcattggcatttaaagccctataagacgtgccataagcataaatcacaattaactacacattgtaaggaatgccataacttaattgattacagagcttctgaggagtttttagagtgcagttgtggttgtaaactaaccaatagtgaacagttaaacgatgcagactttaaaattgcatttgcgcttgcaagtagtaacagccataaaatagtggggttaatatcttggtttgcgaaggttaagcaacttgatgtaagcgatgctgactttaaccgtacttttgttgattactttagtacttggcctgaaagccttactactgaattagatttactcacaaacaatgcgcgcctcaagcaacttaacccttttaataaaactaagttcaactctgtttatggaaatgtgatccgtgatggtcaaatagctgcaacaagtaaccgtaaaaacaaagtacttgatgaactaattaaatattttgttgaattagttgatagtaatcctaaaactaaacatccaaatattgcagatttactgctttgtacttttgataccgcagtattattaaacaccaccacagagcaagtttataggcttcatcaagaaggctttttaaactgcgcttacccacaaaaaaagcacgaacagctcagagctgatagtcatgttttttatttacgccaagtgattgagctacagcaagcattcgcagctgaaacgcctcaaacaaaaaaacaatttatagcgccgtggtaacttatgaacttacaagatgcatttgcgattgaatcacttaaggaaaaaaccacagcacttagaaagttgtttactccatatatgtctcatgttgcggtagatggctttgaagaacaagcgctgactgtgctcattaacctagtttataaacgaagtgagattgatgatttaacaagtacaagaaccgctaaaagtgtattacgtgatgaagtgttactgagtaaatgtattaacgaagttaaatggtttcatactcataatttaaaatatcctgatatacgcgtaagccatcaacgtttaattagtaaggtagtaagtgaagatattgcgggtatttgtagccggtcattacctttaagttttggatggtcgcacaacagtgctgaaattaatcatgcaaagttatttttaacctcatttacttggcaaggtgaagtaacttgtttagcaaatttactaataaatgaggagcctgtttggattaatttaataaggacatacgggtttactaaaaaggcggttttaggcatcgcgggtaaaataaaacagcttttgccagtggcagaactcccattagaagtaagctctttttcaccacaattacaaatgccatttcagcaaagctaccttgcggttacgcctgtagtaagtcacgcaatgctggctaaaattcagcaattaacaacagatcgtaagttaaattttggtttagttgagcactcaagacctgccaatgttggcgatttagcaagctcagtaggtggtaatattagagtgctgcgttactttcctaaaacatattcaaaggctgttaactgctctgaagtattcaataatgatagtgagaaagcatttaaaattcgtgcgctattaaacagtcaatttcaacaggcgcttttggtattggtcggtattaaacagtttaatacgttaaggcaaaagcgattagcgcgagtagcggctattaggcaagtacgtgttagcttgcagttgtggctggataacattctggaagctaaaaataacgctcaagggcaagcctaccctgagtgggcaaagcattacttagatcagagtattactaactgcattagccaatttagtaacgtactaaatgagagccttggtaatttaagtaagctcaaacgctttgcgtatcaccctaatttaatgggggtgtttaaaacgcagttaaactatgtgtttactcactgtattcctgatgaagaaacattaaatgatgagcaaatagtgtatgtgcattgccaagatatgcgagtgtttgatgctgaggcaatggctaatccgtatattcaaggtatgccgtcacttacagctttaaatgggcttgctcataactttgagcgtaagctaaaaaattttatagacccttcaattaagtgtattggtagtgccattaacattgaaagttatcaactacatacaggtaaaccattacctgaaccaagtaagttaaaacaagttgctggccgtagtcatgtcataagatcaggaattatcgataaacctaaatgcgatataacactcgatttagtctttaggctttttgtaccaaacattaagctgttagataagttaaatagtcagcttgtgaaacccgcactaccatctatgtttgcaggcgggactatgcatccaccttcgttataccaaaatattgactggtgccatttacatactaaaccaagtgagctgtttaaaaatataaaggcaaaatcgttaaatggcagttggttgtacccttcaaaaaaagtagtcaaaagttttgaacagttgattgatgcgcttaacggtaactttaatttaagacctgctgccattggttttgctgcgcttgaagaacccataaagcgagatgtagccttacatgaataccattgttatgctgagcccgtaattgggcttttagagtgtgttagcaatacatcagttaagtacgcaggggctaagcagttcttccatgacgcattttgggttatggatgttcaaaaagagtctatgcttatgaaaaagtctaagtttgagtatgaataatgcaattacctcggcatttaagttacacgcgttcgctttcacccagtaaagcggtatttttttataaaacatcggagtctgattttgaaccgctgcaaatagagcaaaataagcttgttgggcaaaagtcagggtttggcgatgcgtatcaaaagcaaaatgtggctaaaaatttagcgccacaagatctagcgtttggaaacccacaaacgattgatgtgtgctacgtacctccagcagtaaatgagctattttgccgtttttcactcagggttgaggctaatagcaatgaaccacacgtttgtgatgaccctaaagttatttattggttaaaacggttttttgaaacctacaaaaaacacaatggtcttaatgaagttgcaactcgctatgctaaaaatatactgatggggaactggctttggcgtaaccgccaatcaccaaatgttgatattgaaatccttactgaacatgcagccccgatcattgttgaaggtgcacaaaaactaaaatggcaaggcaactggcaaaacaatcaaacagcattaataacattatcagaagctattcaagaagggcttagcaatcctcaaaattattgttatttagatataaccgcaaaaattaaaaatgcatttagccaagaggttcaccctagtcaaaagtttgtagacaatgttgaacaaggcatgtcatctaaacaacttgcatacactcaagtcggcgataaaaaagcagccagtttaaactcacaaaaagtaggggctgcgattcaaactattgatgattggtatgagggaggttacaaacctttacgcactcacgagtatggtgcagataagcaaatattagttgcacatagaacgcctaagagccattcagacttttattcattacttccgcgcattgccttgcatattaagcacatggaaaagcatggtttagagcaaagtgaagaatcaaacgcagttcactttattgcagcagtgttgatcaaaggcggcttgttccaaaggagtaaggcatgaagcgctattattttactattacttatttacctaaaaattgtgatgtaagcctccttgcagggcgttgtatcggcatattgcatgggtttatgagttcgcgtgaaattagtaatataggtgtgtgttttcctaaatggaatgagcaagagataggtaatgaattggcgtttgtatcgacagataaaaagcaattaaccaatctatctcagcaaagctattttgagatgatggctcaggataaattatttggcttatcaaaaatactcgaagtaccaacaaaccaaaatgaggttatgtttattcgcaaccaatcagtagctaaggcttttgttggcgaaaagcaaagacgtttaaaacgcgctaaaaaacgagctgaagccagaggtgaagtttataatcctgaatatcaatttgaggcaaaagacataggccattttcattcaatacctgtatcaagcaaagccaacggccaaagttatgttctgcatatacaaaaaattgaaaatactaatgcgacagaaaatcaatttaataattatggctttgctacaaatcaaacatttcaaggtacggttccttctttgaatacccaataacctttaataaggagatatagcatgtacagaagaaaactcaaacactcccgtgttaaaaaccttcataaatttgctagtcaaaaaaataaatctacctgtttagttgaatcctctttagagtttgatgcctgttttcattttgaattttcaccatcaatagccgcatttgaggcacaaccactaggttatgaatatgagtttgataaccgtatttgccgttacacacctgactttttacttacccacacagacggcacgcaaaaatttatagaagtaaaaccgcaaagcaaaattgctgacgaggactttcgtgcacgttttattgaaaagcaaaccatcgctaaacaagatggacgcgacttaatactggttactgataaacaaatccgtgtatacccaacactcaataacttaaaacttttacatcgctattctggttttcagtctttaacagagctgcaagcatcggtgctcgagcttgttaagcaatacggctctattaaagtgggccagttagttaactttttaaaagtaactgccggtgagctacttgctactgtgctacgcttattatcactagggcagttatttgccgacttaactacaaatgaaatatcaatagaaacagcaatttggtctaacaatgtttaatgacggtttgtttgatgatgagtttaaccagccattaccaaaagtagaaaccaaactacctcaaaattacgccaaagatttacaagcccttcctgaaaaaattaaaaatacaacatttgctaaacttaaatatattcaatggcttgaggctaatattcaaggtggctggacacaaaaaaaccttgagcctttattgaaagtaatgcctgaagttgagggtgaaaaaaagcctagctggagaacagctgcacgatggtatagcgcttatacaaatgcagataaaaatatcatggcgctaataccaagccatcaaaaaaagggtaacagggagcgcgatacagccaccgataagttttttgaaaaagcacttgagcgttacttagtaaaagaaaagccatcagtggcttctgcttacaagtattacgcagacttagttatcattgaaaacgacagcgttgtgggcagtgttttaaagcctttaacatacaaagcgtttaaaaatagaatcgataatttaccgcaatacgacgtgatggtttctcgctatggtaagcgtcttgctgatattgcttttaataaagtagaagggcatacacggcctacccgagtactcgaaaaagttgaaattgaccatacaccgcttgatcttattttattagatgatgagctacatatcccgcttggtaggccaacacttaccatgttagtcgatgtgtatagccattgtattgttggcttctactttagcttcagcgagcctagctatgatgcagtaaggcgagcaatgctaaatgcaatgaaacctaaaagtgatgtggcaaaactatacccagatacgataaatgagtggaaatgtgctggcaaaattgaaactctcgttgttgataatggcgctgaattttggagtaacagccttgaacttgcttgtgaagaaattggtattaatactcaatataaccctgttgcaaagccgtggttaaaaccctttgtagaacgtatgtttggcacaattaacactgaattattagaccctgttcctggtaaaaccttttctaacattttacaaaagcatgaatacaatcccaaaaaagatgcaatcatgcgctttacaacctttatgcagctattccataaatgggtagtagacgtttaccatcaagatgccgatagccgctttaagtacatacctagccaactatgggagcaaggctttaatacgttaccgccaacagtgctgagtaatgctgatcttcaacaattagatgttgtgctcagtatttcaaaccatagggtgcttcgtaaaggtggaatacggctagaaaatttaagctacgacagtactgaactagccaactatagaaaacagtttagccataaagtatctcaagaagttttaattaaattaaaccccgatgatatttcttatatatatgtttacctcgataagctagagcattacataaaagtgccatgcatagatccaaacggttacacccaaaatttaagtttgaatcagcataaaataaatatacgtattcatcgcgattttatttccggatctatcgataatgtaggcttagcaaaagcgcgtatgtttattcataataaaattcaaaacgagtttgaagagttaaaaaatgcaccaaaacactcaaaagtaaaagggggtaaagcattagctaagcatcaaaatgtaagtagtgactcacaaaaatcaatagctcagagcgagccattagaacccaaaaaggttacacctaaagagcaaccaacagatagctgggatgactttatttcagacctagatggattttaattatgctgaccgataaacaaaaagcaaaacttaatgaatttcgcgatgtatttattgaatacccaataataactactgtatttaacgactttgacagattaagacttggtaaaggattagcgggcgaaaagccctgcatgctgttaaatggcgatacaggcacaggtaaaacagcactaataaaacagtataaagaacgccatttaccgcaatttattaatggagtgatgaaccaccctgtattagtaagccgcatacctagtaacccgacactagaatctactttagccgagcttcttaaagacttagggcaagtaggtagtacagagcgcaagctgagaataaacggtacgcggttaacgacatcattaataaaatgcctaaaaacgtgtggcacagagcttataattattgatgagtttcaagagctgattgagcacaaccaaggtaaaaagcgccgcgagattgctaatcgattaaaatacattaacgatgaagcgggtgtatcgattgtattggtgggtatgccgtgggcagaaaaaatagcagacgaaccccagtggtcatcgcgtttattagtaaggcggcagctgccttattttaaattatcagaaaacccaaagcattttgtacagttaataattggcctagctaaccgtatgccattcaccgaaaagccaaaattaagtgagcaagcaacagtatttgctttgttctcattgtcaaaaggctgttttagaactcttaaatactttttagatgatgccgtactttatgcattaatggataacgcgaaaaccctcacaaccaagcatctagttaaagcatttggagtactgtttcctgatgtaccaaacctatttaccttgcccgttgcagaaattacagcaagtgaagttgagcgctattcactttataaacttgaaagcgcccaagatgaagatccgtttatagcgactaagtttactgaccaaatgccgattagtcagttgttgaggaagtaacctaggctgctgccaccgctgagcaataactagcataaccccttggggcctctaaacgggtcttgaggggttttttgctgaaacctcaggcatttgagaagcacacggtcacactgcttccggtagtcaataaacgaggaagcggaagagcactgccacccaaattcctcatttggtgttgtttgaagtataagttgacatatttgtactaaaagatggcataaattggaagtataaggtggcatagtctagtatttaaccaaatggttagatggttgactcacatgtacagaagaaaactcaaacactcccgtgttaaaaaccttcataaatttgctagtcaaaaaaataaatctacctgtttagttgaatcctctttagagtttgatgcctgttttcattttgaattttcaccatcaatagccgattagacggacgcaatcttgggatccgagccccaactggggtaacctttgagttctctcagttgggggagcacgtgttgacaattaatcatcggcatagtatatcggcatagtataatacgacaaggtgaggaactaaaccatgtcacatctcgcagaactggttgccagtgcgaaggcggccattagccaggcgtcagatgttgccgcgttagataatgtgcgcgtcgaatatttgggtaaaaaagggcacttaacccttcagatgacgaccctgcgtgagctgccgccagaagagcgtccggcagctggtgcggttatcaacgaagcgaaagagcaggttcagcaggcgctgaatgcgcgtaaagcggaactggaaagcgctgcactgaatgcgcgtctggcggcggaaacgattgatgtctctctgccaggtcgtcgcattgaaaacggcggtctgcatccggttacccgtaccatcgaccgtatcgaaagtttcttcggtgagcttggctttaccgtggcaaccgggccggaaatcgaagacgattatcataacttcgatgctctgaacattcctggtcaccacccggcgcgcgctgaccacgacactttctggtttgacactacccgcctgctgcgtacccagacctctggcgtacagatccgcaccatgaaagcccagcagccaccgattcgtatcatcgcgcctggccgtgtttatcgtaacgactacgaccagactcacacgccgatgttccatcagatggaaggtctgattgttgataccaacatcagctttaccaacctgaaaggcacgctgcacgacttcctgcgtaacttctttgaggaagatttgcagattcgcttccgtccttcctacttcccgtttgccgaaccttctgcagaagtggacgtcatgggtaaaaacggtaaatggctggaagtgctgggctgcgggatggtgcatccgaacgtgttgcgtaacgttggcatcgacccggaagtttactctggtttcggcttcgggatggggatggagcgtctgactatgttgcgttacggcgtcaccgacctgcgttcattcttcgaaaacgatctgcgtttcctcaaacagtttaaataaggaggacaatcatgattgaacaagatggattgcacgcaggttctccggccgcttgggtggagaggctattcggctatgactgggcacaacagacaatcggctgctctgatgccgccgtgttccggctgtcagcgcaggggcgcccggttctttttgtcaagaccgacctgtccggtgccctgaatgaactgcaggacgaggcagcgcggctatcgtggctggccacgacgggcgttccttgcgcagctgtgctcgacgttgtcactgaagcgggaagggactggctgctattgggcgaagtgccggggcaggatctcctgtcatctcaccttgctcctgccgagaaagtatccatcatggctgatgcaatgcggcggctgcatacgcttgatccggctacctgcccattcgaccaccaagcgaaacatcgcatcgagcgagcacgtactcggatggaagccggtcttgtcgatcaggatgatctggacgaagagcatcaggggctcgcgccagccgaactgttcgccaggctcaaggcgcgcatgcccgacggcgaggatctcgtcgtgacccatggcgatgcctgcttgccgaatatcatggtggaaaatggccgcttttctggattcatcgactgtggccggctgggtgtggcggaccgctatcaggacatagcgttggctacccgtgatattgctgaagagcttggcggcgaatgggctgaccgcttcctcgtgctttacggtatcgccgctcccgattcgcagcgcatcgccttctatcgccttcttgacgagttcttctgacctaggctcgagtaatggtttcttagacgtcttgacagctagctcagtcctaggtataatgctagcctgtcaccggatgtgctttccggtctgatgagtccgtgaggacgaaacagcctctacaaataattttgtttaatactagagaaagaggggaaatactagatggtgtcgaaaggtgaggagcttttcacgggggtggttccaatcttagtcgagcttgatggtgacgtgaatggccataagtttagcgtgcgcggcgagggtgagggcgatgcgacgaacggtaaacttactttaaagtttatttgtactacaggcaaattaccggtcccgtggccgaccctggtcactacgcttgggtatggggtagcatgttttgcccgttaccctgaccacatgaaacagcacgatttctttaaatctgccatgcccgaagggtatgttcaggagcgcactatcagttttaaagacgacggaacgtacaaaactcgtgctgaagtaaagttcgaaggtgatacccttgtgaaccgtatcgtccttaaaggcatcgacttcaaagaggacggtaacattttaggccacaaattagagtacaacttcaattcacataaggtttatatcacagcagataagcaaaaaaatggcatcaaggcaaattttaagacccgccacaacgtagaagatggtggagtccagttggcggaccactaccagcaaaatacaccgattggcgatggtccggttttgcttcccgacaatcactatcttagccaccagagtaaactgagtaaggacccaaatgaaaagcgcgaccacatggtattgaaagagcgcgttacagcagctggaattacacacgatatggacgaactttataagtaatagggataacagggtaatcgcaaaaaaccccgcttcggcggggttttttcgcgtttaaacgtgccagggcgtgcccttgggctccccgggcgcgttttttacgcgttctagagtccttactgcagtagttttgctgaaatactcgattcacaaaaatatcaacttatggttgttttgtgagatatcaatatatggttgttttgtggttaagttgctgattataaataattattaaatatcactttatggttgcatcaacaggtaccgagctctcatctgttacgctcggcgtgtagccggccagcctcgcagagcaggattcccgttgagcaccgccaggtgcgaataagggacagtgaagaaggaacacccgctcgcgggtgggcctacttcacctatcctgcccggctgatcgccgttggatacaccaaggaaagtctacacgaaccctttggcaaaatcctgtatatcgtgcgaaaaaggatggatataccgaaaaaatcgctataatgaccccgaagcagggttatgcagcggaaaagcgcttatcagcggtaccggtagctcggctgtgaatgaaatggacttaccaattaaagtaaaaggtgatgatttattcatcaaagtttttgtgccagtgtaaaccattttccaaactgtttaagagtgatttacaacgcgtagcatgtttactttgcgttttataaagctgtatttggtagctttatgccatctattgcttcaatactatgccaatatacacttcacttaccacgctgtaagttaataaaaccgagtttggttatgtcaacttatacttcaaacaacatttgggtgaaaatacattcctttttgacgtcaggtggcacttttcccggtaaaccagcaatagacataagcggctatttaacgaccctgccctgaaccgacgaccgggtcatcgtggccggatcttgcggcccctcggcttgaacgaattgttagacattatttgccgactaccttggtgatctcgcctttcacgtagtggacaaattcttccaactgatctgcgcgcgaggccaagcgatcttcttcttgtccaagataagcctgtctagcttcaagtatgacgggctgatactgggccggcaggcgctccattgcccagtcggcagcgacatccttcggcgcgattttgccggttactgcgctgtaccaaatgcgggacaacgtaagcactacatttcgctcatcgccagcccagtcgggcggcgagttccatagcgttaaggtttcatttagcgcctcaaatagatcctgttcaggaaccggatcaaagagttcctccgccgctggacctaccaaggcaacgctatgttctcttgcttttgtcagcaagatagccagatcaatgtcgatcgtggctggctcgaagatacctgcaagaatgtcattgcgctgccattctccaaattgcagttcgcgcttagctggataacgccacggaatgatgtcgtcgtgcacaacaatggtgacttctacagcgcggagaatctcgctctctccaggggaagccgaagtttccaaaaggtcgttgatcaaagctcgccgcgttgtttcatcaagccttacggtcaccgtaaccagcaaatcaatatcactgtgtggcttcaggccgccatccactgcggagccgtacaaatgtacggccagcaacgtcggttcgagatggcgctcgatgacgccaactacctctgatagttgagtcgatacttcggcgatcaccgcttccctcat

SEQ ID NO: 43 - DNA, 15655 bp, synthetic construct
  source 1..15655: mol_type = other DNA
gcgctgcggacacatacaaagttacccacagattccgtggataagcaggggactaacatgtgaggcaaaacagcagggccgcgccggtggcgtttttccataggctccgccctcctgccagagttcacataaacagacgcttttccggtgcatctgtgggagccgtgaggctcaaccatgaatctgacagtacgggcgaaacccgacaggacttaaagatccccaccgtttccggcgggtcgctccctcttgcgctctcctgttccgaccctgccgtttaccggatacctgttccgcctttctcccttacgggaagtgtggcgctttctcatagctcacacactggtatctcggctcggtgtaggtcgttcgctccaagctgggctgtaagcaagaactccccgttcagcccgactgctgcgccttatccggtaactgttcacttgagtccaacccggaaaagcacggtaaaacgccactggcagcagccattggtaactgggagttcgcagaggatttgtttagctaaacacgcggttgctcttgaagtgtgcgccaaagtccggctacactggaaggacagatttggttgctgtgctctgcgaaagccagttaccacggttaagcagttccccaactgacttaaccttcgatcaaaccacctccccaggtggttttttcgtttacagggcaaaagattacgcgcagaaaaaaaggatctcaagaagatcctttgatcttttctactgaaccgctctagatcaagccacttcctttttgcattgacgcagggtgtcggaaggcaactcgccgaacgcgctcctatagttttcagcgaagcgtcccaaatgtaagaagccgtagtctagggctatctcagttatactacgcacattggcactgggatcgttcaagcaggcgcggatgctttcgagcttgcggttgcggatgtagttcttcggcgtggtgccggcgtgcttctcgaacaaattgtagagcgagcgtggactcatcatcgccagctccgctaaccgctcaaggctgatattccgtttgagattctcctcaatgaattgaacgactcgctcgaaagacgggttacctttgctgaaaatttcacggctgacattgctgcccagcatttcgagcagcttggaagcgatgatccccgcatagtgctcttggacccgaggcatcgactttgtatgttccgcttcgtcacaaactaacccgagtagattgataaagccatcgagttgctggagattgtgtcgcgcggcgaaacggataccctccctcggcttgtgccaattgttgtcactgcacgcccgatcaaggaccactgagggcaatttaacgataaatttctcgcaatcttctgaataggtcaggtcggcttggtcatccggattgagcagcaatagttcgcccggcgcaaaatagtgctcctggccatggccacgccacaggcaatggcctttgagtattatttgcagatgataacatgtttctaatccaggcgagattaccctcacgctaccgccgtagctgattcgacacagatcgaggcatccgaagattctgtggtgcagcctgcctgccgggcgcccgcccttgggcaggcgaatagagtgcgtaccgacatactggttaacataatcggagactgcatagggctcggcgtggacgaagatctgacttttctcgttcaataagcaaaaatccatagttcacggttctcttattttaatgtgggctgcttggtgtgatgtagaaaggcgccaagtcgatgaaaatgcatctcgacgtgatgcgtatacgggttacccccattgccacgttgcgccatcctttttgcaatcagtgaccacttttccaagcaaaaataacgccaagcagaacgaagacgttctttttaagaagcgagaacaccagaagttcgtgctgtcggggcatggggcgacgaattggcggataaaggggatctagtccagccttgcaagaagcggatacaggagtgcaaaaaatggctatctctagtaaggcctaccccttaggctttatgcaagtcgacgtgacctgccgtataggcagctgaaaattggagtacgagacgttcatgctgtcgcgttgagtgacctgccgtataggcagctgaaaattagcgaattccgagcgaaggagatatacatatggcttttctattttctcccaaggctcgggcattttctgacgaatcgctggaaagttacttgttacgggtcgtttcagagaatttttttgactcgtatgaagggctcagcttagctattcgcgaagagctgcatgagcttgattttgaggcgcatggtgcattcccagtagatttaaagaggctcaatgtttaccacgccaaacataatagccattttaggatgcgggctttaggactactcgaaacactactagatttacctcgatacgagctacaaaagttggctttgctaaagtcagatattaaatttaactcctccgtcgctttatataacaatggcgtagacattcccctgaggtttattcgtcaccacgccgaggaagctgttgattcgattccggtatgctcacaatgtcttgcagaagaagcctatataaaacaaagttggcatataaagtgggtaaatgcatgcactaaacatcagtgtgctttgctacataactgcccagaatgctacgctccaattaactatatcgagaatgagtcaattactcattgttcatgcggttttgagctgtcttgcgctagtacctcgcctgtaaatacgttaagtattgaacatttaaataaattactggataaaggtgagcgcaacgatagtaacccgctatttaacaatatgactcttacagaacgttttgctgcgcttctttggtatcaggagcggtattctcaaacagataacttttgtttaaatgatgctgtgaactattttagtaaatggccagcagtttttaatacagagcttgatgaactaagtaaaaatgcagaaatgaagttaatagatctgtttaataaaactgagtttaagtttatttttggggatgctattttagcttgccccagtactcaaaagcagagtgaatctcactttatttatagggctctattagattatttagttactttagttgagagtaaccctaaaactaaaaagcccaacgcagccgacttattagtaagtgtattggaggctgcaactttattaggtacttcagtagagcaggtttataggttgtaccaaaatggtattttgcaaacggcatttcgtcataaaatgaaccagcggatcaacccttataagggcgcgttttttttaagacatgttatagagtacaaaaccagttttggaaatgacaaagctagaatgtatttgtcggcatggtgagtatatgcatcttaaggaactgctagagattacagacaccactgagcgggataggtcattacgtcgtgcttttagcccttatacggcaatgattgatataacaggcagcgaagccgttgccctgattattttgttaaacctgacttatcgaaaaaaccaagttgatgacttgctggataaaaagctcgcaaaacaggctttaaaaagtgaagaccatattaataaatgtattaaggaaatagcgtggtttcatactcataatttaaagtaccctgacattagagtcagtaagcaaaatttagccgtagagcctccaacactgcactcttatgttttgagtagtgctaactatcctaaagcctatggctggtcacataactcagctaaagttaattttgctaaattatttgttagttactttaaatggcaaaatcaagtcagttggctggcacaagtattagctacgaactcggataactggaaatccgcatttacctctcttgggttatccgttaaggcatttaaaagtttatgtgtaaccgttaaaaattcattgcctgaagaggccattcccgactctgttgaccgctactctcgccaaattagaatgccttatcatgatggttacttagctgttacgcctgtaattagccatgttgttcaatcaaaaattcaacaggcggcaattgataaacgagcccgatttagcaatgtagagtttacgcgtcctgctgctgtcagtatgttagctgcttccttaggtggtgttattaatgtgcttaattaccctccttatatacgaagtaaatatcatggtttaagtaactcacgagcatttaaattaaataatgggcaaacagtatttaacgttgaggcactattaaagccggaattaattaaagccttagaaggtattatatttagtaataatgcgctggctcttaaacagcgtagacaacaaaaagtaaaaaatattaaagagctgagaaacacgcttttagaatggttttcacctgtatttgaatggcgcttggacgctattgagaatgggtatgacttagaacagcttgagagtgcttcagagcgactagagtataaaatactatcgctacccgacaatgaactcccttcgctaacgattcctttatttaggttactaaatgaaatgcttggcggtgtgagcatgacacaaaggtatgcttttcatcctaaattaatgagccctttaaaagcagctttacaatggttgcttgttaatcttacagatcaaaaacatgtactgattgaagaagatgatgaacattatcgctatcttcatttaagcggtatacgtgtgtttgatgcgcaagcattatcaaacccttactgctcaggtattccatctttaaccgctgtttggggtatgattcacagctaccaaagaaaacttaatgaggcgctaggaacaaatgtacggttcacatccttttcttggtttattaggaattattctgctgtagcaggaaaaaaacttcctgaactgagccttcaaggcgctcagcaaagtaggctcaagcggccaggaattatcgatggcaaatactgtgatttggtatttgatttaataatacacattgatggttatgaagatgacttacaggcagtagatagtaagcctgacattttgaaagcgcattttccatctaactttgcaggtggtgttatgcatcagcctgagcttaactcaaatataaattggtgctgtttatatagtaatgaaaatcagttatttgaaaagttaaggcgactccctttatctggttgttgggttatgccaactgagcacaaaatacaggatttagatgagctactcttattattaaatagtgactctaaactaagcccatctatgatgggatatatgttactcaccgaaccgatggctagagttggatcacttgaaagactgcattgttatgctgaaccagcaataggagtggtgaaatacgaagcggccactagtgtaaggctaaaaggtattggtaactattttaatagcgctttttggatgctagatgcacaagaaaagtttatgctaatgaaaaaagtttaaccggaaaatacttaatggagctctgtaatatattaaaatatgatcgctcgctttaccctggtaaagctgtgtttttttataaaacggctgactctgattttgttccactagaggctgatattaataaaattcgaggccctaaatctggttttactgaagcattcaccccacagttttccccaaaaaacatctcacctcaggacttaacacataataatatattaactctcgaagagtgttatgtacctccaaatgtggagcatatattttgtcggttttctttgagagtacaggctaactcgttggtcccttcaggctgtagtgatccagaggttttttctttattaaaagagttggcagaaacatttaaagaatgcggtggttataaagaactagcagtaagatattgtcgaaatattttgataggtacatggctttggcgtaatcaaaacaccggcaacactcaaattgaaattaaaaccagcaaagggagttgttatttaatcgataacactcgtaagttagcttgggaaagcaaatgggcttctgatgatctaaaagtattggaagagcttagtaatgaaattgagagcgcattaactgatcccaatgtgttttggagtgctgatataaccgcgaaaatagaagcctcattttgccaagagatttacccaagccaaatccttaacgacaaggttaagcaaggagaggcctcaaaacagtttgtaaaagctaagtgtgcagatggccgttacgctgtaagttttaattcagtaaaaataggagcagcccttcagtcaatagatgattggtgggatgaggatgcaagtaaaagattacgagtgcatgagtttggtgctgataaagaaataggggttgcccgacgtcctcctgattctgaacagaatttttattctattttcaaaaatacggaatggtatttgtcagcccttaaaaattgcattactaataaaaatgaaaaaatagacccagctatttattacttattctctgtattgattaagggcggaatgttccagaaaaaagcagaggctaaaaaggcgtaattatgcaaaggtattacttcacagtccactttttaccaaaacaagctaatctagcgctgcttactggccgttgtatttctattatgcatgggtttattttgaagcataatattgaaggaatgggggttacgtttcctgcatggtcggactcatcaattggtaatgaaattgcttttgtttacacggacaaggagattttaaatacccttaaagatcaggcatattttgtggacatgcaagattgtggcttttttaaagtaagccaagttttagctgtacctgacagctgcgaagaagtacgttttatacgtaatcaggcggtagcaaaaattttcacaggtgaaagtagaagaagattaaagcgcctgcaaaaaagagcgttagcaagaggtgaagattttaatcctaaaaagatcgaagctccccgagagattgatattttccatagagtggctatgactagtaagagttcacaagaggattatattctgcatattcaaaagcaagatgttgactgccaagctgagccatactttagtaattatgggcttgcctcaaatgaaaagtttaaaggcacggttccggatttatcaccctcaatagatagaaattaacctttaataaggagatatagcatgtatatacgcaacttgagaaagccatctccaaataaaaatgtatttaaatttgcgagcactaaagttagtagtgtagttatgtgtgagagttcattagagtttgatgcatgttttcatcatgaatataacgatttgatagagagttttgggagtcagcctgaaggctttaaatatgagtttatgggtaaaagtttaccttacacaccagatgcactgatttcatatacagataaaacccaaaaataccacgaatataagccctattctaaaattgcttctccactatttagagctgaatttgctgccaaaagagctgcatcattaaaattggggattgatcttgttttagtaactgataggcaaattagggtaaatccaatattaaacaacttaaagttattacaccgctactcaggtgtttatggtatcagcggcattcaaaaagagttgctcagttttattcataaatcaggggtaatcaagctaaatgatataagctctcaggttgggataccaattggtgaaacacgatcttttttatttgggctcatgcataaagggttggttaaggctgatctagggtgtgatgatttaactaataatccaacattatgggctacaccatgactgacttttttaatgaatttgatgaaagcctggtaccattaaagccacaaacgcccacacaatacgtcaaattagatgatgccaacttaatccagcgtgatttggataccttttcagatacctttaaaaaccaagcactacaaaggtataagctaattagcactatagataaaaaactttcacgcggctggacccaacgaaatttagatcctattttagatgagctttttaaaggaggtgacgtagttcggccaaattggcgaactgttgctcgttggcgcaaaaaatatatcgaaagcaacggtgatatagcctcccttgctgataaaaaccacaaaatgggaaacagaactaaccgtataaaaggggatgataaattttttgataaagcattagaacgatttttagatgctaaaagacctactatagcaactgcatatcagtactataaagaccttattgttattgaaaatgagagtattgtcgaaggcaagattccaataatatcctacaatgcgtttaataaaagaatcaaagcaatacccccatacgcggtcgcggtcgcaaggcatggtaaatttaaagcagaccaatggtttgcttactgcgctgcgcacgtacccccgacaagaatattagagcgtgtagagattgatcatacaccacttgatttaatcctacttgatgatgagttacttattcccataggaagaccttacctaacattacttattgatgtatttagtggctgtgttcttggttttcatcttagttataaatccccttcctacgtatctgctgctaaggctattactcatgcgattaaaccaaagtctcttgatgctctgaatatagaactacaaaatgattggccttgctttggtaaatttgaaaatttagttgtagataatggtgctgagttttggtctaaaaacttagagcatgcttgtcagtcagcaggaataaatatccaatataaccctgtgcgcaagccttggctaaaaccctttatagagcgtttttttggggtgatgaatgaatatttcttacctgaattaccaggaaagacattttcaaatattttagaaaaagaagagtataaacctgagaaagatgcaattatgcgcttctcaacttttgttgaagaatttcaccgctggatcgcggatgtgtatcatcaagacagtaattcacgtgaaactcgaatcccaattaaacgttggcaacaagggtttgatgcatatcccccattgaccatgaatgaagaggaggaaacgcgtttttcaatgttaatgcgcatctcagactcaagaacgttaacgagaaatgggtttaaatatcaagagttaatgtatgactcaacagctttggctgattatcgtaaacattatccgcaaacaaaagaaactgtaaaaaaactgattaaagtagaccctgatgacatctcaaaaatttatgtttatttagaagagttagaaagttatctcgaagtaccgtgtacagatcctaccggctatacggatggtttaagtatctatgagcataaaacaataaaaaaaattaacagggaagtcatacgggaatctaaagatagtttgggcttagcgaaagcacgcatggctattcatgagcgagtaaagcaagagcaagaagttttcattgaatcaaaaactaaagctaagataacagctgttaaaaagcaagctcaaatagctgatgtaagtaatacaggaacgagcactattaaggtttctgaagaaagtgcagcccctgtgcaaaaacatataagtaacgataattctgacgactgggatgatgacttagaggcatttgaatgaatgccttaacagagatacagatagagaagcttcggaactttagcgattgcatcgttatgcacccgcaaattaaaacaatttttaatgactttgatgaattaagattaaaccgtaaatttcagtcagaccaacagtgtatgctattaattggtgatacaggtgttggaaaaagtcataccattaatcactacaaaaaaagagttctagctacacagaattatagtcgaaacactatgccagtcttagtaagtcgtatatctagggggaaaggcttagatgctactttagtccaaatgctggcagatctggagctatttggaagtagtcaaattaaaaagcgaggctacaaaacagaccttactaaaaagctcgtagagagcttaattaaagctcaagtagagctactcatcattaatgagtttcaggagttaatagagtttaaaagcgtacaagaacgacaacaaattgcaaatgggttaaagtttattagtgaagaggccaaagtgccaatagtactggttggtatgccttgggctgcaaaaatagctgaagaacctcaatgggcttctcgcttagttagaaaaagaaaacttgaatactttagcctaaaaaatgacagcaagtactttcgccaatatttgatggggttagctaagaaaatgccatttgatgtacctcctaagctcgaaagtaaaaataccacaatagcgttgtttgctgcatgtcgaggtgagaatcgagcccttaaacatctactgttggaggctttaaaattagcactaagttgtaatgagtatcttgaaaataaacattttattactgcttatgacaagtttgatttttttaatgataaggaaaaactaaaatcaaaaaatccttttaaacaagacattaaagatattgaaatttatgaggtaatcaaaaactcatcttataacccaaatgcattagacccagaagatatgctcacagatcgagtgtttgcaatagtaaagtaacctaggctgctgccaccgctgagcaataactagcataaccccttggggcctctaaacgggtcttgaggggttttttgctgaaacctcaggcatttgagaagcacacggtcacactgcttccggtagtcaataaacgaggaagcggaagagcgtgttgatcggctttaaggatctagtgtcgctgcaaccatagtttgacataatgcaaccataccttgacataattaaagtcatactctgacataaagccccttattaaaaatgatgctaaaaataaattccattataatcaattatttaagaattaattaaaccatagtgtgacatagtggctttttatttgtatagtatgtgtactcaaataataaaaatttacttatgtatatacgcaacttaagaaagccatctccaaataaaaatgtatttaagaggcagtccctcttagaggatcctactaggagcacgtgttgacaattaatcatcggcatagtatatcggcatagtataatacgacaaggtgaggaactaaaccatgaacatcaaaaagtttgcaaaacaagcaacagtattaacctttactaccgcactgctggcaggaggcgcaactcaagcgtttgcgaaagaaacgaaccaaaagccatataaggaaacatacggcatttcccatattacacgccatgatatgctgcaaatccctgaacagcaaaaaaatgaaaaatataaagttcctgagttcgattcgtccacaattaaaaatatctcttctgcaaaaggcctggacgtttgggacagctggccattacaaaacactgacggcactgtcgcaaactatcacggctaccacatcgtctttgcattagccggagatcctaaaaatgcggatgacacatcgatttacatgttctatcaaaaagtcggcgaaacttctattgacagctggaaaaacgctggccgcgtctttaaagacagcgacaaattcgatgcaaatgattctatcctaaaagaccaaacacaagaatggtcaggttcagccacatttacatctgacggaaaaatccgtttattctacactgatttctccggtaaacattacggcaaacaaacactgacaactgcacaagttaacgtatcagcatcagacagctctttgaacatcaacggtgtagaggattataaatcaatctttgacggtgacggaaaaacgtatcaaaatgtacagcagttcatcgatgaaggcaactacagctcaggcgacaaccatacgctgagagatcctcactacgtagaagataaaggccacaaatacttagtatttgaagcaaacactggaactgaagatggctaccaaggcgaagaatctttatttaacaaagcatactatggcaaaagcacatcattcttccgtcaagaaagtcaaaaacttctgcaaagcgataaaaaacgcacggctgagttagcaaacggcgctctcggtatgattgagctaaacgatgattacacactgaaaaaagtgatgaaaccgctgattgcatctaacacagtaacagatgaaattgaacgcgcgaacgtctttaaaatgaacggcaaatggtacctgttcactgactcccgcggatcaaaaatgacgattgacggcattacgtctaacgatatttacatgcttggttatgtttctaattctttaactggcccatacaagccgctgaacaaaactggccttgtgttaaaaatggatcttgatcctaacgatgtaacctttacttactcacacttcgctgtacctcaagcgaaaggaaacaatgtcgtgattacaagctatatgacaaacagaggattctacgcagacaaacaatcaacgtttgcgcctagcttcctgctgaacatcaaaggcaagaaaacatctgttgtcaaagacagcatccttgaacaaggacaattaacagttaacaaataaggaggacaatcatgaaatctaacaatgcgctcatcgtcatcctcggcaccgtcaccctggatgctgtaggcataggcttggttatgccggtactgccgggcctcttgcgggatatcgtccattccgacagcatcgccagtcactatggcgtgctgctagcgctatatgcgttgatgcaatttctatgcgcacccgttctcggagcactgtccgaccgctttggccgccgcccagtcctgctcgcttcgctacttggagccactatcgactacgcgatcatggcgaccacacccgtcctgtggatcctctacgccggacgcatcgtggccggcatcaccggcgccacaggtgcggttgctggcgcctatatcgccgacatcaccgatggggaagatcgggctcgccacttcgggctcatgagcgcttgtttcggcgtgggtatggtggcaggccccgtggccgggggactgttgggcgccatctccttgcatgcaccattccttgcggcggcggtgctcaacggcctcaacctactactgggctgcttcctaatgcaggagtcgcataagggagagcgtcgaccgatgcccttgagagccttcaacccagtcagctccttccggtgggcgcggggcatgactatcgtcgccgcacttatgactgtcttctttatcatgcaactcgtaggacaggtgccggcagcgctctgggtcattttcggcgaggaccgctttcgctggagcgcgacgatgatcggcctgtcgcttgcggtattcggaatcttgcacgccctcgctcaagccttcgtcactggtcccgccaccaaacgtttcggcgagaagcaggccattatcgccggcatggcggccgacgcgctgggctacgtcttgctggcgttcgcgacgcgaggctggatggccttccccattatgattcttctcgcttccggcggcatcgggatgcccgcgttgcaggccatgctgtccaggcaggtagatgacgaccatcagggacagcttcaaggatcgctcgcggctcttaccagcctaacttcgatcactggaccgctgatcgtcacggcgatttatgccgcctcggcgagcacatggaacgggttggcatggattgtaggcgccgccctataccttgtctgcctccccgcgttgcgtcgcggtgcatggagccgggccacctcgacctgatgtccgatcatctgttacgccggcggtagccggccagcctcgcagagcaggattcccgttgagcaccgccaggtgcgaataagggacagtgaagaaggaacacccgctcgcgggtgggcctacttcacctatcctgcccggctgacgccgttggatacaccaaggaaagtctacacgaaccctttggcaaaatcctgtatatcgtgcgaaaaaggatggatataccgaaaaaatcgctataatgaccccgaagcagggttatgcagcggaaaagcgctctttgttgatacaaccataaaatgataattacacccataaattgataattatcacacccataaattgatattgcctcttcatggtctaaacttcagtaagtttacgacattttcctcgaggtcatttccggggatccgcgatcgcttctccttacgcatctgtgcggtatttcaggtaccctgcccaagtcttatgaatgccgtataggcagctgaagataaaaacaatcgattcgatgtttaagttaatgtaattctgccgaaaaggcagtgagtagtaattgaaaaaaccagtcttatatccgggctggtttttttgtttttagcgttataacttttatttcactatgtcactgtatggttgcattttatgtcagtgaatggttgcaggttttttgtaagttattgatatgcctatccagtgtatgtcacgctttgcttgcagcgacatctaggatcttagcgcgcttttatggacgtcaggtggcacttttcccggtaaaccagcaatagacataagcggctatttaacgaccctgccctgaaccgacgaccgggtcatcgtggccggatcttgcggcccctcggcttgaacgaattgttagacattatttgccgactaccttggtgatctcgcctttcacgtagtggacaaattcttccaactgatctgcgcgcgaggccaagcgatcttcttcttgtccaagataagcctgtctagcttcaagtatgacgggctgatactgggccggcaggcgctccattgcccagtcggcagcgacatccttcggcgcgattttgccggttactgcgctgtaccaaatgcgggacaacgtaagcactacatttcgctcatcgccagcccagtcgggcggcgagttccatagcgttaaggtttcatttagcgcctcaaatagatcctgttcaggaaccggatcaaagagttcctccgccgctggacctaccaaggcaacgctatgttctcttgcttttgtcagcaagatagccagatcaatgtcgatcgtggctggctcgaagatacctgcaagaatgtcattgcgctgccattctccaaattgcagttcgcgcttagctggataacgccacggaatgatgtcgtcgtgcacaacaatggtgacttctacagcgcggagaatctcgctctctccaggggaagccgaagtttccaaaaggtcgttgatcaaagctcgccgcgttgtttcatcaagccttacggtcaccgtaaccagcaaatcaatatcactgtgtggcttcaggccgccatccactgcggagccgtacaaatgtacggccagcaacgtcggttcgagatggcgctcgatgacgccaactacctctgatagttgagtcgatacttcggcgatcaccgcttccctcatactcttcctttttcaatattattgaagcatttatcagggttattgtctcatgagcggatacatatttgaatgtatttagaaaaataaacaaatagctagctcactcggtcgctacgctccgggcgtgagactgcggcgg

SEQ ID NO: 44 - DNA, 15683 bp, synthetic construct
  source 1..15683: mol_type = other DNA
actcttcctttttcaatattattgaagcatttatcagggttattgtctcatgagcggatacatatttgaatgtatttagaaaaataaacaaatagctagctcactcggtcgctacgctccgggcgtgagactgcggcgggcgctgcggacacatacaaagttacccacagattccgtggataagcaggggactaacatgtgaggcaaaacagcagggccgcgccggtggcgtttttccataggctccgccctcctgccagagttcacataaacagacgcttttccggtgcatctgtgggagccgtgaggctcaaccatgaatctgacagtacgggcgaaacccgacaggacttaaagatccccaccgtttccggcgggtcgctccctcttgcgctctcctgttccgaccctgccgtttaccggatacctgttccgcctttctcccttacgggaagtgtggcgctttctcatagctcacacactggtatctcggctcggtgtaggtcgttcgctccaagctgggctgtaagcaagaactccccgttcagcccgactgctgcgccttatccggtaactgttcacttgagtccaacccggaaaagcacggtaaaacgccactggcagcagccattggtaactgggagttcgcagaggatttgtttagctaaacacgcggttgctcttgaagtgtgcgccaaagtccggctacactggaaggacagatttggttgctgtgctctgcgaaagccagttaccacggttaagcagttccccaactgacttaaccttcgatcaaaccacctccccaggtggttttttcgtttacagggcaaaagattacgcgcagaaaaaaaggatctcaagaagatcctttgatcttttctactgaaccgctctagatcaagccacttcctttttgcattgacgcagggtgtcggaaggcaactcgccgaacgcgctcctatagttttcagcgaagcgtcccaaatgtaagaagccgtagtctagggctatctcagttatactacgcacattggcactgggatcgttcaagcaggcgcggatgctttcgagcttgcggttgcggatgtagttcttcggcgtggtgccggcgtgcttctcgaacaaattgtagagcgagcgtggactcatcatcgccagctccgctaaccgctcaaggctgatattccgtttgagattctcctcaatgaattgaacgactcgctcgaaagacgggttacctttgctgaaaatttcacggctgacattgctgcccagcatttcgagcagcttggaagcgatgatccccgcatagtgctcttggacccgaggcatcgactttgtatgttccgcttcgtcacaaactaacccgagtagattgataaagccatcgagttgctggagattgtgtcgcgcggcgaaacggataccctccctcggcttgtgccaattgttgtcactgcacgcccgatcaaggaccactgagggcaatttaacgataaatttctcgcaatcttctgaataggtcaggtcggcttggtcatccggattgagcagcaatagttcgcccggcgcaaaatagtgctcctggccatggccacgccacaggcaatggcctttgagtattatttgcagatgataacatgtttctaatccaggcgagattaccctcacgctaccgccgtagctgattcgacacagatcgaggcatccgaagattctgtggtgcagcctgcctgccgggcgcccgcccttgggcaggcgaatagagtgcgtaccgacatactggttaacataatcggagactgcatagggctcggcgtggacgaagatctgacttttctcgttcaataagcaaaaatccatagttcacggttctcttattttaatgtgggctgcttggtgtgatgtagaaaggcgccaagtcgatgaaaatgcatctcgacgtgatgcgtatacgggttacccccattgccacgttgcgccatcctttttgcaatcagtgaccacttttccaagcaaaaataacgccaagcagaacgaagacgttctttttaagaagcgagaacaccagaagttcgtgctgtcggggcatggggcgacgaattggcggataaaggggatctagtccagccttgcaagaagcggatacaggagtgcaaaaaatggctatctctagtaaggcctaccccttaggctttatgcaactagtgtgaactgccgagtaggtagctggaaatgttgcgacgcttagcagctctcaagcaagagggtgaactgccgagtaggtagctggaaattagccaattggaattccgagcgaaggagatatacatatgcattttttagttcaaacaaaactttatcctgatgaggctcttgaaagctatttgctaaggcttgctagggataactcatacgatggctatagtgagcttgctgatattttatggcaatggcttgtagagcaagatcatgatcttgaaggtgcgttgccgttagagctgggtaaagttgatgtttatcatgctaggcaagcgagtagctttagaataagagcgctcaagttggtagctcaattagctgatgtaaacgctggtaatattcttgcgcttgcatggcggcgcagtaattttaaatttggcaacttagtagcagtaagccgtaatgagcagacaattcctcttgagttacttcgcactgataatatacctgtttgcattgaatgcttgtttgaatcttcttacgttccttttcattggcatttaaagccctataagacgtgccataagcataaatcacaattaactacacattgtaaggaatgccataacttaattgattacagagcttctgaggagtttttagagtgcagttgtggttgtaaactaaccaatagtgaacagttaaacgatgcagactttaaaattgcatttgcgcttgcaagtagtaacagccataaaatagtggggttaatatcttggtttgcgaaggttaagcaacttgatgtaagcgatgctgactttaaccgtacttttgttgattactttagtacttggcctgaaagccttactactgaattagatttactcacaaacaatgcgcgcctcaagcaacttaacccttttaataaaactaagttcaactctgtttatggaaatgtgatccgtgatggtcaaatagctgcaacaagtaaccgtaaaaacaaagtacttgatgaactaattaaatattttgttgaattagttgatagtaatcctaaaactaaacatccaaatattgcagatttactgctttgtacttttgataccgcagtattattaaacaccaccacagagcaagtttataggcttcatcaagaaggctttttaaactgcgcttacccacaaaaaaagcacgaacagctcagagctgatagtcatgttttttatttacgccaagtgattgagctacagcaagcattcgcagctgaaacgcctcaaacaaaaaaacaatttatagcgccgtggtaacttatgaacttacaagatgcatttgcgattgaatcacttaaggaaaaaaccacagcacttagaaagttgtttactccatatatgtctcatgttgcggtagatggctttgaagaacaagcgctgactgtgctcattaacctagtttataaacgaagtgagattgatgatttaacaagtacaagaaccgctaaaagtgtattacgtgatgaagtgttactgagtaaatgtattaacgaagttaaatggtttcatactcataatttaaaatatcctgatatacgcgtaagccatcaacgtttaattagtaaggtagtaagtgaagatattgcgggtatttgtagccggtcattacctttaagttttggatggtcgcacaacagtgctgaaattaatcatgcaaagttatttttaacctcatttacttggcaaggtgaagtaacttgtttagcaaatttactaataaatgaggagcctgtttggattaatttaataaggacatacgggtttactaaaaaggcggttttaggcatcgcgggtaaaataaaacagcttttgccagtggcagaactcccattagaagtaagctctttttcaccacaattacaaatgccatttcagcaaagctaccttgcggttacgcctgtagtaagtcacgcaatgctggctaaaattcagcaattaacaacagatcgtaagttaaattttggtttagttgagcactcaagacctgccaatgttggcgatttagcaagctcagtaggtggtaatattagagtgctgcgttactttcctaaaacatattcaaaggctgttaactgctctgaagtattcaataatgatagtgagaaagcatttaaaattcgtgcgctattaaacagtcaatttcaacaggcgcttttggtattggtcggtattaaacagtttaatacgttaaggcaaaagcgattagcgcgagtagcggctattaggcaagtacgtgttagcttgcagttgtggctggataacattctggaagctaaaaataacgctcaagggcaagcctaccctgagtgggcaaagcattacttagatcagagtattactaactgcattagccaatttagtaacgtactaaatgagagccttggtaatttaagtaagctcaaacgctttgcgtatcaccctaatttaatgggggtgtttaaaacgcagttaaactatgtgtttactcactgtattcctgatgaagaaacattaaatgatgagcaaatagtgtatgtgcattgccaagatatgcgagtgtttgatgctgaggcaatggctaatccgtatattcaaggtatgccgtcacttacagctttaaatgggcttgctcataactttgagcgtaagctaaaaaattttatagacccttcaattaagtgtattggtagtgccattaacattgaaagttatcaactacatacaggtaaaccattacctgaaccaagtaagttaaaacaagttgctggccgtagtcatgtcataagatcaggaattatcgataaacctaaatgcgatataacactcgatttagtctttaggctttttgtaccaaacattaagctgttagataagttaaatagtcagcttgtgaaacccgcactaccatctatgtttgcaggcgggactatgcatccaccttcgttataccaaaatattgactggtgccatttacatactaaaccaagtgagctgtttaaaaatataaaggcaaaatcgttaaatggcagttggttgtacccttcaaaaaaagtagtcaaaagttttgaacagttgattgatgcgcttaacggtaactttaatttaagacctgctgccattggttttgctgcgcttgaagaacccataaagcgagatgtagccttacatgaataccattgttatgctgagcccgtaattgggcttttagagtgtgttagcaatacatcagttaagtacgcaggggctaagcagttcttccatgacgcattttgggttatggatgttcaaaaagagtctatgcttatgaaaaagtctaagtttgagtatgaataatgcaattacctcggcatttaagttacacgcgttcgctttcacccagtaaagcggtatttttttataaaacatcggagtctgattttgaaccgctgcaaatagagcaaaataagcttgttgggcaaaagtcagggtttggcgatgcgtatcaaaagcaaaatgtggctaaaaatttagcgccacaagatctagcgtttggaaacccacaaacgattgatgtgtgctacgtacctccagcagtaaatgagctattttgccgtttttcactcagggttgaggctaatagcaatgaaccacacgtttgtgatgaccctaaagttatttattggttaaaacggttttttgaaacctacaaaaaacacaatggtcttaatgaagttgcaactcgctatgctaaaaatatactgatggggaactggctttggcgtaaccgccaatcaccaaatgttgatattgaaatccttactgaacatgcagccccgatcattgttgaaggtgcacaaaaactaaaatggcaaggcaactggcaaaacaatcaaacagcattaataacattatcagaagctattcaagaagggcttagcaatcctcaaaattattgttatttagatataaccgcaaaaattaaaaatgcatttagccaagaggttcaccctagtcaaaagtttgtagacaatgttgaacaaggcatgtcatctaaacaacttgcatacactcaagtcggcgataaaaaagcagccagtttaaactcacaaaaagtaggggctgcgattcaaactattgatgattggtatgagggaggttacaaacctttacgcactcacgagtatggtgcagataagcaaatattagttgcacatagaacgcctaagagccattcagacttttattcattacttccgcgcattgccttgcatattaagcacatggaaaagcatggtttagagcaaagtgaagaatcaaacgcagttcactttattgcagcagtgttgatcaaaggcggcttgttccaaaggagtaaggcatgaagcgctattattttactattacttatttacctaaaaattgtgatgtaagcctccttgcagggcgttgtatcggcatattgcatgggtttatgagttcgcgtgaaattagtaatataggtgtgtgttttcctaaatggaatgagcaagagataggtaatgaattggcgtttgtatcgacagataaaaagcaattaaccaatctatctcagcaaagctattttgagatgatggctcaggataaattatttggcttatcaaaaatactcgaagtaccaacaaaccaaaatgaggttatgtttattcgcaaccaatcagtagctaaggcttttgttggcgaaaagcaaagacgtttaaaacgcgctaaaaaacgagctgaagccagaggtgaagtttataatcctgaatatcaatttgaggcaaaagacataggccattttcattcaatacctgtatcaagcaaagccaacggccaaagttatgttctgcatatacaaaaaattgaaaatactaatgcgacagaaaatcaatttaataattatggctttgctacaaatcaaacatttcaaggtacggttccttctttgaatacccaataacctttaataaggagatatagcatgtacagaagaaaactcaaacactcccgtgttaaaaaccttcataaatttgctagtcaaaaaaataaatctacctgtttagttgaatcctctttagagtttgatgcctgttttcattttgaattttcaccatcaatagccgcatttgaggcacaaccactaggttatgaatatgagtttgataaccgtatttgccgttacacacctgactttttacttacccacacagacggcacgcaaaaatttatagaagtaaaaccgcaaagcaaaattgctgacgaggactttcgtgcacgttttattgaaaagcaaaccatcgctaaacaagatggacgcgacttaatactggttactgataaacaaatccgtgtatacccaacactcaataacttaaaacttttacatcgctattctggttttcagtctttaacagagctgcaagcatcggtgctcgagcttgttaagcaatacggctctattaaagtgggccagttagttaactttttaaaagtaactgccggtgagctacttgctactgtgctacgcttattatcactagggcagttatttgccgacttaactacaaatgaaatatcaatagaaacagcaatttggtctaacaatgtttaatgacggtttgtttgatgatgagtttaaccagccattaccaaaagtagaaaccaaactacctcaaaattacgccaaagatttacaagcccttcctgaaaaaattaaaaatacaacatttgctaaacttaaatatattcaatggcttgaggctaatattcaaggtggctggacacaaaaaaaccttgagcctttattgaaagtaatgcctgaagttgagggtgaaaaaaagcctagctggagaacagctgcacgatggtatagcgcttatacaaatgcagataaaaatatcatggcgctaataccaagccatcaaaaaaagggtaacagggagcgcgatacagccaccgataagttttttgaaaaagcacttgagcgttacttagtaaaagaaaagccatcagtggcttctgcttacaagtattacgcagacttagttatcattgaaaacgacagcgttgtgggcagtgttttaaagcctttaacatacaaagcgtttaaaaatagaatcgataatttaccgcaatacgacgtgatggtttctcgctatggtaagcgtcttgctgatattgcttttaataaagtagaagggcatacacggcctacccgagtactcgaaaaagttgaaattgaccatacaccgcttgatcttattttattagatgatgagctacatatcccgcttggtaggccaacacttaccatgttagtcgatgtgtatagccattgtattgttggcttctactttagcttcagcgagcctagctatgatgcagtaaggcgagcaatgctaaatgcaatgaaacctaaaagtgatgtggcaaaactatacccagatacgataaatgagtggaaatgtgctggcaaaattgaaactctcgttgttgataatggcgctgaattttggagtaacagccttgaacttgcttgtgaagaaattggtattaatactcaatataaccctgttgcaaagccgtggttaaaaccctttgtagaacgtatgtttggcacaattaacactgaattattagaccctgttcctggtaaaaccttttctaacattttacaaaagcatgaatacaatcccaaaaaagatgcaatcatgcgctttacaacctttatgcagctattccataaatgggtagtagacgtttaccatcaagatgccgatagccgctttaagtacatacctagccaactatgggagcaaggctttaatacgttaccgccaacagtgctgagtaatgctgatcttcaacaattagatgttgtgctcagtatttcaaaccatagggtgcttcgtaaaggtggaatacggctagaaaatttaagctacgacagtactgaactagccaactatagaaaacagtttagccataaagtatctcaagaagttttaattaaattaaaccccgatgatatttcttatatatatgtttacctcgataagctagagcattacataaaagtgccatgcatagatccaaacggttacacccaaaatttaagtttgaatcagcataaaataaatatacgtattcatcgcgattttatttccggatctatcgataatgtaggcttagcaaaagcgcgtatgtttattcataataaaattcaaaacgagtttgaagagttaaaaaatgcaccaaaacactcaaaagtaaaagggggtaaagcattagctaagcatcaaaatgtaagtagtgactcacaaaaatcaatagctcagagcgagccattagaacccaaaaaggttacacctaaagagcaaccaacagatagctgggatgactttatttcagacctagatggattttaattatgctgaccgataaacaaaaagcaaaacttaatgaatttcgcgatgtatttattgaatacccaataataactactgtatttaacgactttgacagattaagacttggtaaaggattagcgggcgaaaagccctgcatgctgttaaatggcgatacaggcacaggtaaaacagcactaataaaacagtataaagaacgccatttaccgcaatttattaatggagtgatgaaccaccctgtattagtaagccgcatacctagtaacccgacactagaatctactttagccgagcttcttaaagacttagggcaagtaggtagtacagagcgcaagctgagaataaacggtacgcggttaacgacatcattaataaaatgcctaaaaacgtgtggcacagagcttataattattgatgagtttcaagagctgattgagcacaaccaaggtaaaaagcgccgcgagattgctaatcgattaaaatacattaacgatgaagcgggtgtatcgattgtattggtgggtatgccgtgggcagaaaaaatagcagacgaaccccagtggtcatcgcgtttattagtaaggcggcagctgccttattttaaattatcagaaaacccaaagcattttgtacagttaataattggcctagctaaccgtatgccattcaccgaaaagccaaaattaagtgagcaagcaacagtatttgctttgttctcattgtcaaaaggctgttttagaactcttaaatactttttagatgatgccgtactttatgcattaatggataacgcgaaaaccctcacaaccaagcatctagttaaagcatttggagtactgtttcctgatgtaccaaacctatttaccttgcccgttgcagaaattacagcaagtgaagttgagcgctattcactttataaacttgaaagcgcccaagatgaagatccgtttatagcgactaagtttactgaccaaatgccgattagtcagttgttgaggaagtaacctaggctgctgccaccgctgagcaataactagcataaccccttggggcctctaaacgggtcttgaggggttttttgctgaaacctcaggcatttgagaagcacacggtcacactgcttccggtagtcaataaacgaggaagcggaagagcactgccacccaaattcctcatttggtgttgtttgaagtataagttgacatatttgtactaaaagatggcataaattggaagtataaggtggcatagtctagtatttaaccaaatggttagatggttgactcacatgtacagaagaaaactcaaacactcccgtgttaaaaaccttcataaatttgctagtcaaaaaaataaatctacctgtttagttgaatcctctttagagtttgatgcctgttttcattttgaattttcaccatcaatagccgattagacggacgcaatcttgggatccgagccccaactggggtaacctttgagttctctcagttgggggagcacgtgttgacaattaatcatcggcatagtatatcggcatagtataatacgacaaggtgaggaactaaaccatgtcacatctcgcagaactggttgccagtgcgaaggcggccattagccaggcgtcagatgttgccgcgttagataatgtgcgcgtcgaatatttgggtaaaaaagggcacttaacccttcagatgacgaccctgcgtgagctgccgccagaagagcgtccggcagctggtgcggttatcaacgaagcgaaagagcaggttcagcaggcgctgaatgcgcgtaaagcggaactggaaagcgctgcactgaatgcgcgtctggcggcggaaacgattgatgtctctctgccaggtcgtcgcattgaaaacggcggtctgcatccggttacccgtaccatcgaccgtatcgaaagtttcttcggtgagcttggctttaccgtggcaaccgggccggaaatcgaagacgattatcataacttcgatgctctgaacattcctggtcaccacccggcgcgcgctgaccacgacactttctggtttgacactacccgcctgctgcgtacccagacctctggcgtacagatccgcaccatgaaagcccagcagccaccgattcgtatcatcgcgcctggccgtgtttatcgtaacgactacgaccagactcacacgccgatgttccatcagatggaaggtctgattgttgataccaacatcagctttaccaacctgaaaggcacgctgcacgacttcctgcgtaacttctttgaggaagatttgcagattcgcttccgtccttcctacttcccgtttgccgaaccttctgcagaagtggacgtcatgggtaaaaacggtaaatggctggaagtgctgggctgcgggatggtgcatccgaacgtgttgcgtaacgttggcatcgacccggaagtttactctggtttcggcttcgggatggggatggagcgtctgactatgttgcgttacggcgtcaccgacctgcgttcattcttcgaaaacgatctgcgtttcctcaaacagtttaaataaggaggacaatcatgattgaacaagatggattgcacgcaggttctccggccgcttgggtggagaggctattcggctatgactgggcacaacagacaatcggctgctctgatgccgccgtgttccggctgtcagcgcaggggcgcccggttctttttgtcaagaccgacctgtccggtgccctgaatgaactgcaggacgaggcagcgcggctatcgtggctggccacgacgggcgttccttgcgcagctgtgctcgacgttgtcactgaagcgggaagggactggctgctattgggcgaagtgccggggcaggatctcctgtcatctcaccttgctcctgccgagaaagtatccatcatggctgatgcaatgcggcggctgcatacgcttgatccggctacctgcccattcgaccaccaagcgaaacatcgcatcgagcgagcacgtactcggatggaagccggtcttgtcgatcaggatgatctggacgaagagcatcaggggctcgcgccagccgaactgttcgccaggctcaaggcgcgcatgcccgacggcgaggatctcgtcgtgacccatggcgatgcctgcttgccgaatatcatggtggaaaatggccgcttttctggattcatcgactgtggccggctgggtgtggcggaccgctatcaggacatagcgttggctacccgtgatattgctgaagagcttggcggcgaatgggctgaccgcttcctcgtgctttacggtatcgccgctcccgattcgcagcgcatcgccttctatcgccttcttgacgagttcttctgacctaggctcgagtaatggtttcttagacgtcttgacagctagctcagtcctaggtataatgctagcctgtcaccggatgtgctttccggtctgatgagtccgtgaggacgaaacagcctctacaaataattttgtttaatactagagaaagaggggaaatactagatggtgtcgaaaggtgaggagcttttcacgggggtggttccaatcttagtcgagcttgatggtgacgtgaatggccataagtttagcgtgcgcggcgagggtgagggcgatgcgacgaacggtaaacttactttaaagtttatttgtactacaggcaaattaccggtcccgtggccgaccctggtcactacgcttgggtatggggtagcatgttttgcccgttaccctgaccacatgaaacagcacgatttctttaaatctgccatgcccgaagggtatgttcaggagcgcactatcagttttaaagacgacggaacgtacaaaactcgtgctgaagtaaagttcgaaggtgatacccttgtgaaccgtatcgtccttaaaggcatcgacttcaaagaggacggtaacattttaggccacaaattagagtacaacttcaattcacataaggtttatatcacagcagataagcaaaaaaatggcatcaaggcaaattttaagacccgccacaacgtagaagatggtggagtccagttggcggaccactaccagcaaaatacaccgattggcgatggtccggttttgcttcccgacaatcactatcttagccaccagagtaaactgagtaaggacccaaatgaaaagcgcgaccacatggtattgaaagagcgcgttacagcagctggaattacacacgatatggacgaactttataagtaatagggataacagggtaatcgcaaaaaaccccgcttcggcggggttttttcgcgtttaaacgtgccagggcgtgcccttgggctccccgggcgcgttttttacgcgttctagagtccttactgcagtagttttgctgaaatactcgattcacaaaaatatcaacttatggttgttttgtgagatatcaatatatggttgttttgtggttaagttgctgattataaataattattaaatatcactttatggttgcatcaacaggtaccgagctctcatctgttacgctcggcgtgtagccggccagcctcgcagagcaggattcccgttgagcaccgccaggtgcgaataagggacagtgaagaaggaacacccgctcgcgggtgggcctacttcacctatcctgcccggctgatcgccgttggatacaccaaggaaagtctacacgaaccctttggcaaaatcctgtatatcgtgcgaaaaaggatggatataccgaaaaaatcgctataatgaccccgaagcagggttatgcagcggaaaagcgcttatcagcggtaccggtagctcggctgtgaatgaaatggacttaccaattaaagtaaaaggtgatgatttattcatcaaagtttttgtgccagtgtaaaccattttccaaactgtttaagagtgatttacaacgcgtagcatgtttactttgcgttttataaagctgtatttggtagctttatgccatctattgcttcaatactatgccaatatacacttcacttaccacgctgtaagttaataaaaccgagtttggttatgtcaacttatacttcaaacaacatttgggtgaaaatacattcctttttgacgtcaggtggcacttttcccggtaaaccagcaatagacataagcggctatttaacgaccctgccctgaaccgacgaccgggtcatcgtggccggatcttgcggcccctcggcttgaacgaattgttagacattatttgccgactaccttggtgatctcgcctttcacgtagtggacaaattcttccaactgatctgcgcgcgaggccaagcgatcttcttcttgtccaagataagcctgtctagcttcaagtatgacgggctgatactgggccggcaggcgctccattgcccagtcggcagcgacatccttcggcgcgattttgccggttactgcgctgtaccaaatgcgggacaacgtaagcactacatttcgctcatcgccagcccagtcgggcggcgagttccatagcgttaaggtttcatttagcgcctcaaatagatcctgttcaggaaccggatcaaagagttcctccgccgctggacctaccaaggcaacgctatgttctcttgcttttgtcagcaagatagccagatcaatgtcgatcgtggctggctcgaagatacctgcaagaatgtcattgcgctgccattctccaaattgcagttcgcgcttagctggataacgccacggaatgatgtcgtcgtgcacaacaatggtgacttctacagcgcggagaatctcgctctctccaggggaagccgaagtttccaaaaggtcgttgatcaaagctcgccgcgttgtttcatcaagccttacggtcaccgtaaccagcaaatcaatatcactgtgtggcttcaggccgccatccactgcggagccgtacaaatgtacggccagcaacgtcggttcgagatggcgctcgatgacgccaactacctctgatagttgagtcgatacttcggcgatcaccgcttccctcat

SEQ ID NO: 45 - DNA, 15655 bp, synthetic construct
  source 1..15655: mol_type = other DNA
gcgctgcggacacatacaaagttacccacagattccgtggataagcaggggactaacatgtgaggcaaaacagcagggccgcgccggtggcgtttttccataggctccgccctcctgccagagttcacataaacagacgcttttccggtgcatctgtgggagccgtgaggctcaaccatgaatctgacagtacgggcgaaacccgacaggacttaaagatccccaccgtttccggcgggtcgctccctcttgcgctctcctgttccgaccctgccgtttaccggatacctgttccgcctttctcccttacgggaagtgtggcgctttctcatagctcacacactggtatctcggctcggtgtaggtcgttcgctccaagctgggctgtaagcaagaactccccgttcagcccgactgctgcgccttatccggtaactgttcacttgagtccaacccggaaaagcacggtaaaacgccactggcagcagccattggtaactgggagttcgcagaggatttgtttagctaaacacgcggttgctcttgaagtgtgcgccaaagtccggctacactggaaggacagatttggttgctgtgctctgcgaaagccagttaccacggttaagcagttccccaactgacttaaccttcgatcaaaccacctccccaggtggttttttcgtttacagggcaaaagattacgcgcagaaaaaaaggatctcaagaagatcctttgatcttttctactgaaccgctctagatcaagccacttcctttttgcattgacgcagggtgtcggaaggcaactcgccgaacgcgctcctatagttttcagcgaagcgtcccaaatgtaagaagccgtagtctagggctatctcagttatactacgcacattggcactgggatcgttcaagcaggcgcggatgctttcgagcttgcggttgcggatgtagttcttcggcgtggtgccggcgtgcttctcgaacaaattgtagagcgagcgtggactcatcatcgccagctccgctaaccgctcaaggctgatattccgtttgagattctcctcaatgaattgaacgactcgctcgaaagacgggttacctttgctgaaaatttcacggctgacattgctgcccagcatttcgagcagcttggaagcgatgatccccgcatagtgctcttggacccgaggcatcgactttgtatgttccgcttcgtcacaaactaacccgagtagattgataaagccatcgagttgctggagattgtgtcgcgcggcgaaacggataccctccctcggcttgtgccaattgttgtcactgcacgcccgatcaaggaccactgagggcaatttaacgataaatttctcgcaatcttctgaataggtcaggtcggcttggtcatccggattgagcagcaatagttcgcccggcgcaaaatagtgctcctggccatggccacgccacaggcaatggcctttgagtattatttgcagatgataacatgtttctaatccaggcgagattaccctcacgctaccgccgtagctgattcgacacagatcgaggcatccgaagattctgtggtgcagcctgcctgccgggcgcccgcccttgggcaggcgaatagagtgcgtaccgacatactggttaacataatcggagactgcatagggctcggcgtggacgaagatctgacttttctcgttcaataagcaaaaatccatagttcacggttctcttattttaatgtgggctgcttggtgtgatgtagaaaggcgccaagtcgatgaaaatgcatctcgacgtgatgcgtatacgggttacccccattgccacgttgcgccatcctttttgcaatcagtgaccacttttccaagcaaaaataacgccaagcagaacgaagacgttctttttaagaagcgagaacaccagaagttcgtgctgtcggggcatggggcgacgaattggcggataaaggggatctagtccagccttgcaagaagcggatacaggagtgcaaaaaatggctatctctagtaaggcctaccccttaggctttatgcaagtcgacgtgacctgccgtataggcagctgaaaatgatcaagagcaagttcggctatcacctggtgcgtgacctgccgtataggcagctgaaaattagcgaattccgagcgaaggagatatacatatggcttttctattttctcccaaggctcgggcattttctgacgaatcgctggaaagttacttgttacgggtcgtttcagagaatttttttgactcgtatgaagggctcagcttagctattcgcgaagagctgcatgagcttgattttgaggcgcatggtgcattcccagtagatttaaagaggctcaatgtttaccacgccaaacataatagccattttaggatgcgggctttaggactactcgaaacactactagatttacctcgatacgagctacaaaagttggctttgctaaagtcagatattaaatttaactcctccgtcgctttatataacaatggcgtagacattcccctgaggtttattcgtcaccacgccgaggaagctgttgattcgattccggtatgctcacaatgtcttgcagaagaagcctatataaaacaaagttggcatataaagtgggtaaatgcatgcactaaacatcagtgtgctttgctacataactgcccagaatgctacgctccaattaactatatcgagaatgagtcaattactcattgttcatgcggttttgagctgtcttgcgctagtacctcgcctgtaaatacgttaagtattgaacatttaaataaattactggataaaggtgagcgcaacgatagtaacccgctatttaacaatatgactcttacagaacgttttgctgcgcttctttggtatcaggagcggtattctcaaacagataacttttgtttaaatgatgctgtgaactattttagtaaatggccagcagtttttaatacagagcttgatgaactaagtaaaaatgcagaaatgaagttaatagatctgtttaataaaactgagtttaagtttatttttggggatgctattttagcttgccccagtactcaaaagcagagtgaatctcactttatttatagggctctattagattatttagttactttagttgagagtaaccctaaaactaaaaagcccaacgcagccgacttattagtaagtgtattggaggctgcaactttattaggtacttcagtagagcaggtttataggttgtaccaaaatggtattttgcaaacggcatttcgtcataaaatgaaccagcggatcaacccttataagggcgcgttttttttaagacatgttatagagtacaaaaccagttttggaaatgacaaagctagaatgtatttgtcggcatggtgagtatatgcatcttaaggaactgctagagattacagacaccactgagcgggataggtcattacgtcgtgcttttagcccttatacggcaatgattgatataacaggcagcgaagccgttgccctgattattttgttaaacctgacttatcgaaaaaaccaagttgatgacttgctggataaaaagctcgcaaaacaggctttaaaaagtgaagaccatattaataaatgtattaaggaaatagcgtggtttcatactcataatttaaagtaccctgacattagagtcagtaagcaaaatttagccgtagagcctccaacactgcactcttatgttttgagtagtgctaactatcctaaagcctatggctggtcacataactcagctaaagttaattttgctaaattatttgttagttactttaaatggcaaaatcaagtcagttggctggcacaagtattagctacgaactcggataactggaaatccgcatttacctctcttgggttatccgttaaggcatttaaaagtttatgtgtaaccgttaaaaattcattgcctgaagaggccattcccgactctgttgaccgctactctcgccaaattagaatgccttatcatgatggttacttagctgttacgcctgtaattagccatgttgttcaatcaaaaattcaacaggcggcaattgataaacgagcccgatttagcaatgtagagtttacgcgtcctgctgctgtcagtatgttagctgcttccttaggtggtgttattaatgtgcttaattaccctccttatatacgaagtaaatatcatggtttaagtaactcacgagcatttaaattaaataatgggcaaacagtatttaacgttgaggcactattaaagccggaattaattaaagccttagaaggtattatatttagtaataatgcgctggctcttaaacagcgtagacaacaaaaagtaaaaaatattaaagagctgagaaacacgcttttagaatggttttcacctgtatttgaatggcgcttggacgctattgagaatgggtatgacttagaacagcttgagagtgcttcagagcgactagagtataaaatactatcgctacccgacaatgaactcccttcgctaacgattcctttatttaggttactaaatgaaatgcttggcggtgtgagcatgacacaaaggtatgcttttcatcctaaattaatgagccctttaaaagcagctttacaatggttgcttgttaatcttacagatcaaaaacatgtactgattgaagaagatgatgaacattatcgctatcttcatttaagcggtatacgtgtgtttgatgcgcaagcattatcaaacccttactgctcaggtattccatctttaaccgctgtttggggtatgattcacagctaccaaagaaaacttaatgaggcgctaggaacaaatgtacggttcacatccttttcttggtttattaggaattattctgctgtagcaggaaaaaaacttcctgaactgagccttcaaggcgctcagcaaagtaggctcaagcggccaggaattatcgatggcaaatactgtgatttggtatttgatttaataatacacattgatggttatgaagatgacttacaggcagtagatagtaagcctgacattttgaaagcgcattttccatctaactttgcaggtggtgttatgcatcagcctgagcttaactcaaatataaattggtgctgtttatatagtaatgaaaatcagttatttgaaaagttaaggcgactccctttatctggttgttgggttatgccaactgagcacaaaatacaggatttagatgagctactcttattattaaatagtgactctaaactaagcccatctatgatgggatatatgttactcaccgaaccgatggctagagttggatcacttgaaagactgcattgttatgctgaaccagcaataggagtggtgaaatacgaagcggccactagtgtaaggctaaaaggtattggtaactattttaatagcgctttttggatgctagatgcacaagaaaagtttatgctaatgaaaaaagtttaaccggaaaatacttaatggagctctgtaatatattaaaatatgatcgctcgctttaccctggtaaagctgtgtttttttataaaacggctgactctgattttgttccactagaggctgatattaataaaattcgaggccctaaatctggttttactgaagcattcaccccacagttttccccaaaaaacatctcacctcaggacttaacacataataatatattaactctcgaagagtgttatgtacctccaaatgtggagcatatattttgtcggttttctttgagagtacaggctaactcgttggtcccttcaggctgtagtgatccagaggttttttctttattaaaagagttggcagaaacatttaaagaatgcggtggttataaagaactagcagtaagatattgtcgaaatattttgataggtacatggctttggcgtaatcaaaacaccggcaacactcaaattgaaattaaaaccagcaaagggagttgttatttaatcgataacactcgtaagttagcttgggaaagcaaatgggcttctgatgatctaaaagtattggaagagcttagtaatgaaattgagagcgcattaactgatcccaatgtgttttggagtgctgatataaccgcgaaaatagaagcctcattttgccaagagatttacccaagccaaatccttaacgacaaggttaagcaaggagaggcctcaaaacagtttgtaaaagctaagtgtgcagatggccgttacgctgtaagttttaattcagtaaaaataggagcagcccttcagtcaatagatgattggtgggatgaggatgcaagtaaaagattacgagtgcatgagtttggtgctgataaagaaataggggttgcccgacgtcctcctgattctgaacagaatttttattctattttcaaaaatacggaatggtatttgtcagcccttaaaaattgcattactaataaaaatgaaaaaatagacccagctatttattacttattctctgtattgattaagggcggaatgttccagaaaaaagcagaggctaaaaaggcgtaattatgcaaaggtattacttcacagtccactttttaccaaaacaagctaatctagcgctgcttactggccgttgtatttctattatgcatgggtttattttgaagcataatattgaaggaatgggggttacgtttcctgcatggtcggactcatcaattggtaatgaaattgcttttgtttacacggacaaggagattttaaatacccttaaagatcaggcatattttgtggacatgcaagattgtggcttttttaaagtaagccaagttttagctgtacctgacagctgcgaagaagtacgttttatacgtaatcaggcggtagcaaaaattttcacaggtgaaagtagaagaagattaaagcgcctgcaaaaaagagcgttagcaagaggtgaagattttaatcctaaaaagatcgaagctccccgagagattgatattttccatagagtggctatgactagtaagagttcacaagaggattatattctgcatattcaaaagcaagatgttgactgccaagctgagccatactttagtaattatgggcttgcctcaaatgaaaagtttaaaggcacggttccggatttatcaccctcaatagatagaaattaacctttaataaggagatatagcatgtatatacgcaacttgagaaagccatctccaaataaaaatgtatttaaatttgcgagcactaaagttagtagtgtagttatgtgtgagagttcattagagtttgatgcatgttttcatcatgaatataacgatttgatagagagttttgggagtcagcctgaaggctttaaatatgagtttatgggtaaaagtttaccttacacaccagatgcactgatttcatatacagataaaacccaaaaataccacgaatataagccctattctaaaattgcttctccactatttagagctgaatttgctgccaaaagagctgcatcattaaaattggggattgatcttgttttagtaactgataggcaaattagggtaaatccaatattaaacaacttaaagttattacaccgctactcaggtgtttatggtatcagcggcattcaaaaagagttgctcagttttattcataaatcaggggtaatcaagctaaatgatataagctctcaggttgggataccaattggtgaaacacgatcttttttatttgggctcatgcataaagggttggttaaggctgatctagggtgtgatgatttaactaataatccaacattatgggctacaccatgactgacttttttaatgaatttgatgaaagcctggtaccattaaagccacaaacgcccacacaatacgtcaaattagatgatgccaacttaatccagcgtgatttggataccttttcagatacctttaaaaaccaagcactacaaaggtataagctaattagcactatagataaaaaactttcacgcggctggacccaacgaaatttagatcctattttagatgagctttttaaaggaggtgacgtagttcggccaaattggcgaactgttgctcgttggcgcaaaaaatatatcgaaagcaacggtgatatagcctcccttgctgataaaaaccacaaaatgggaaacagaactaaccgtataaaaggggatgataaattttttgataaagcattagaacgatttttagatgctaaaagacctactatagcaactgcatatcagtactataaagaccttattgttattgaaaatgagagtattgtcgaaggcaagattccaataatatcctacaatgcgtttaataaaagaatcaaagcaatacccccatacgcggtcgcggtcgcaaggcatggtaaatttaaagcagaccaatggtttgcttactgcgctgcgcacgtacccccgacaagaatattagagcgtgtagagattgatcatacaccacttgatttaatcctacttgatgatgagttacttattcccataggaagaccttacctaacattacttattgatgtatttagtggctgtgttcttggttttcatcttagttataaatccccttcctacgtatctgctgctaaggctattactcatgcgattaaaccaaagtctcttgatgctctgaatatagaactacaaaatgattggccttgctttggtaaatttgaaaatttagttgtagataatggtgctgagttttggtctaaaaacttagagcatgcttgtcagtcagcaggaataaatatccaatataaccctgtgcgcaagccttggctaaaaccctttatagagcgtttttttggggtgatgaatgaatatttcttacctgaattaccaggaaagacattttcaaatattttagaaaaagaagagtataaacctgagaaagatgcaattatgcgcttctcaacttttgttgaagaatttcaccgctggatcgcggatgtgtatcatcaagacagtaattcacgtgaaactcgaatcccaattaaacgttggcaacaagggtttgatgcatatcccccattgaccatgaatgaagaggaggaaacgcgtttttcaatgttaatgcgcatctcagactcaagaacgttaacgagaaatgggtttaaatatcaagagttaatgtatgactcaacagctttggctgattatcgtaaacattatccgcaaacaaaagaaactgtaaaaaaactgattaaagtagaccctgatgacatctcaaaaatttatgtttatttagaagagttagaaagttatctcgaagtaccgtgtacagatcctaccggctatacggatggtttaagtatctatgagcataaaacaataaaaaaaattaacagggaagtcatacgggaatctaaagatagtttgggcttagcgaaagcacgcatggctattcatgagcgagtaaagcaagagcaagaagttttcattgaatcaaaaactaaagctaagataacagctgttaaaaagcaagctcaaatagctgatgtaagtaatacaggaacgagcactattaaggtttctgaagaaagtgcagcccctgtgcaaaaacatataagtaacgataattctgacgactgggatgatgacttagaggcatttgaatgaatgccttaacagagatacagatagagaagcttcggaactttagcgattgcatcgttatgcacccgcaaattaaaacaatttttaatgactttgatgaattaagattaaaccgtaaatttcagtcagaccaacagtgtatgctattaattggtgatacaggtgttggaaaaagtcataccattaatcactacaaaaaaagagttctagctacacagaattatagtcgaaacactatgccagtcttagtaagtcgtatatctagggggaaaggcttagatgctactttagtccaaatgctggcagatctggagctatttggaagtagtcaaattaaaaagcgaggctacaaaacagaccttactaaaaagctcgtagagagcttaattaaagctcaagtagagctactcatcattaatgagtttcaggagttaatagagtttaaaagcgtacaagaacgacaacaaattgcaaatgggttaaagtttattagtgaagaggccaaagtgccaatagtactggttggtatgccttgggctgcaaaaatagctgaagaacctcaatgggcttctcgcttagttagaaaaagaaaacttgaatactttagcctaaaaaatgacagcaagtactttcgccaatatttgatggggttagctaagaaaatgccatttgatgtacctcctaagctcgaaagtaaaaataccacaatagcgttgtttgctgcatgtcgaggtgagaatcgagcccttaaacatctactgttggaggctttaaaattagcactaagttgtaatgagtatcttgaaaataaacattttattactgcttatgacaagtttgatttttttaatgataaggaaaaactaaaatcaaaaaatccttttaaacaagacattaaagatattgaaatttatgaggtaatcaaaaactcatcttataacccaaatgcattagacccagaagatatgctcacagatcgagtgtttgcaatagtaaagtaacctaggctgctgccaccgctgagcaataactagcataaccccttggggcctctaaacgggtcttgaggggttttttgctgaaacctcaggcatttgagaagcacacggtcacactgcttccggtagtcaataaacgaggaagcggaagagcgtgttgatcggctttaaggatctagtgtcgctgcaaccatagtttgacataatgcaaccataccttgacataattaaagtcatactctgacataaagccccttattaaaaatgatgctaaaaataaattccattataatcaattatttaagaattaattaaaccatagtgtgacatagtggctttttatttgtatagtatgtgtactcaaataataaaaatttacttatgtatatacgcaacttaagaaagccatctccaaataaaaatgtatttaagaggcagtccctcttagaggatcctactaggagcacgtgttgacaattaatcatcggcatagtatatcggcatagtataatacgacaaggtgaggaactaaaccatgaacatcaaaaagtttgcaaaacaagcaacagtattaacctttactaccgcactgctggcaggaggcgcaactcaagcgtttgcgaaagaaacgaaccaaaagccatataaggaaacatacggcatttcccatattacacgccatgatatgctgcaaatccctgaacagcaaaaaaatgaaaaatataaagttcctgagttcgattcgtccacaattaaaaatatctcttctgcaaaaggcctggacgtttgggacagctggccattacaaaacactgacggcactgtcgcaaactatcacggctaccacatcgtctttgcattagccggagatcctaaaaatgcggatgacacatcgatttacatgttctatcaaaaagtcggcgaaacttctattgacagctggaaaaacgctggccgcgtctttaaagacagcgacaaattcgatgcaaatgattctatcctaaaagaccaaacacaagaatggtcaggttcagccacatttacatctgacggaaaaatccgtttattctacactgatttctccggtaaacattacggcaaacaaacactgacaactgcacaagttaacgtatcagcatcagacagctctttgaacatcaacggtgtagaggattataaatcaatctttgacggtgacggaaaaacgtatcaaaatgtacagcagttcatcgatgaaggcaactacagctcaggcgacaaccatacgctgagagatcctcactacgtagaagataaaggccacaaatacttagtatttgaagcaaacactggaactgaagatggctaccaaggcgaagaatctttatttaacaaagcatactatggcaaaagcacatcattcttccgtcaagaaagtcaaaaacttctgcaaagcgataaaaaacgcacggctgagttagcaaacggcgctctcggtatgattgagctaaacgatgattacacactgaaaaaagtgatgaaaccgctgattgcatctaacacagtaacagatgaaattgaacgcgcgaacgtctttaaaatgaacggcaaatggtacctgttcactgactcccgcggatcaaaaatgacgattgacggcattacgtctaacgatatttacatgcttggttatgtttctaattctttaactggcccatacaagccgctgaacaaaactggccttgtgttaaaaatggatcttgatcctaacgatgtaacctttacttactcacacttcgctgtacctcaagcgaaaggaaacaatgtcgtgattacaagctatatgacaaacagaggattctacgcagacaaacaatcaacgtttgcgcctagcttcctgctgaacatcaaaggcaagaaaacatctgttgtcaaagacagcatccttgaacaaggacaattaacagttaacaaataaggaggacaatcatgaaatctaacaatgcgctcatcgtcatcctcggcaccgtcaccctggatgctgtaggcataggcttggttatgccggtactgccgggcctcttgcgggatatcgtccattccgacagcatcgccagtcactatggcgtgctgctagcgctatatgcgttgatgcaatttctatgcgcacccgttctcggagcactgtccgaccgctttggccgccgcccagtcctgctcgcttcgctacttggagccactatcgactacgcgatcatggcgaccacacccgtcctgtggatcctctacgccggacgcatcgtggccggcatcaccggcgccacaggtgcggttgctggcgcctatatcgccgacatcaccgatggggaagatcgggctcgccacttcgggctcatgagcgcttgtttcggcgtgggtatggtggcaggccccgtggccgggggactgttgggcgccatctccttgcatgcaccattccttgcggcggcggtgctcaacggcctcaacctactactgggctgcttcctaatgcaggagtcgcataagggagagcgtcgaccgatgcccttgagagccttcaacccagtcagctccttccggtgggcgcggggcatgactatcgtcgccgcacttatgactgtcttctttatcatgcaactcgtaggacaggtgccggcagcgctctgggtcattttcggcgaggaccgctttcgctggagcgcgacgatgatcggcctgtcgcttgcggtattcggaatcttgcacgccctcgctcaagccttcgtcactggtcccgccaccaaacgtttcggcgagaagcaggccattatcgccggcatggcggccgacgcgctgggctacgtcttgctggcgttcgcgacgcgaggctggatggccttccccattatgattcttctcgcttccggcggcatcgggatgcccgcgttgcaggccatgctgtccaggcaggtagatgacgaccatcagggacagcttcaaggatcgctcgcggctcttaccagcctaacttcgatcactggaccgctgatcgtcacggcgatttatgccgcctcggcgagcacatggaacgggttggcatggattgtaggcgccgccctataccttgtctgcctccccgcgttgcgtcgcggtgcatggagccgggccacctcgacctgatgtccgatcatctgttacgccggcggtagccggccagcctcgcagagcaggattcccgttgagcaccgccaggtgcgaataagggacagtgaagaaggaacacccgctcgcgggtgggcctacttcacctatcctgcccggctgacgccgttggatacaccaaggaaagtctacacgaaccctttggcaaaatcctgtatatcgtgcgaaaaaggatggatataccgaaaaaatcgctataatgaccccgaagcagggttatgcagcggaaaagcgctctttgttgatacaaccataaaatgataattacacccataaattgataattatcacacccataaattgatattgcctcttcatggtctaaacttcagtaagtttacgacattttcctcgaggtcatttccggggatccgcgatcgcttctccttacgcatctgtgcggtatttcaggtaccctgcccaagtcttatgaatgccgtataggcagctgaagataaaaacaatcgattcgatgtttaagttaatgtaattctgccgaaaaggcagtgagtagtaattgaaaaaaccagtcttatatccgggctggtttttttgtttttagcgttataacttttatttcactatgtcactgtatggttgcattttatgtcagtgaatggttgcaggttttttgtaagttattgatatgcctatccagtgtatgtcacgctttgcttgcagcgacatctaggatcttagcgcgcttttatggacgtcaggtggcacttttcccggtaaaccagcaatagacataagcggctatttaacgaccctgccctgaaccgacgaccgggtcatcgtggccggatcttgcggcccctcggcttgaacgaattgttagacattatttgccgactaccttggtgatctcgcctttcacgtagtggacaaattcttccaactgatctgcgcgcgaggccaagcgatcttcttcttgtccaagataagcctgtctagcttcaagtatgacgggctgatactgggccggcaggcgctccattgcccagtcggcagcgacatccttcggcgcgattttgccggttactgcgctgtaccaaatgcgggacaacgtaagcactacatttcgctcatcgccagcccagtcgggcggcgagttccatagcgttaaggtttcatttagcgcctcaaatagatcctgttcaggaaccggatcaaagagttcctccgccgctggacctaccaaggcaacgctatgttctcttgcttttgtcagcaagatagccagatcaatgtcgatcgtggctggctcgaagatacctgcaagaatgtcattgcgctgccattctccaaattgcagttcgcgcttagctggataacgccacggaatgatgtcgtcgtgcacaacaatggtgacttctacagcgcggagaatctcgctctctccaggggaagccgaagtttccaaaaggtcgttgatcaaagctcgccgcgttgtttcatcaagccttacggtcaccgtaaccagcaaatcaatatcactgtgtggcttcaggccgccatccactgcggagccgtacaaatgtacggccagcaacgtcggttcgagatggcgctcgatgacgccaactacctctgatagttgagtcgatacttcggcgatcaccgcttccctcatactcttcctttttcaatattattgaagcatttatcagggttattgtctcatgagcggatacatatttgaatgtatttagaaaaataaacaaatagctagctcactcggtcgctacgctccgggcgtgagactgcggcgg

SEQ ID NO: 46 - DNA, 15683 bp, synthetic construct
  source 1..15683: mol_type = other DNA
actcttcctttttcaatattattgaagcatttatcagggttattgtctcatgagcggatacatatttgaatgtatttagaaaaataaacaaatagctagctcactcggtcgctacgctccgggcgtgagactgcggcgggcgctgcggacacatacaaagttacccacagattccgtggataagcaggggactaacatgtgaggcaaaacagcagggccgcgccggtggcgtttttccataggctccgccctcctgccagagttcacataaacagacgcttttccggtgcatctgtgggagccgtgaggctcaaccatgaatctgacagtacgggcgaaacccgacaggacttaaagatccccaccgtttccggcgggtcgctccctcttgcgctctcctgttccgaccctgccgtttaccggatacctgttccgcctttctcccttacgggaagtgtggcgctttctcatagctcacacactggtatctcggctcggtgtaggtcgttcgctccaagctgggctgtaagcaagaactccccgttcagcccgactgctgcgccttatccggtaactgttcacttgagtccaacccggaaaagcacggtaaaacgccactggcagcagccattggtaactgggagttcgcagaggatttgtttagctaaacacgcggttgctcttgaagtgtgcgccaaagtccggctacactggaaggacagatttggttgctgtgctctgcgaaagccagttaccacggttaagcagttccccaactgacttaaccttcgatcaaaccacctccccaggtggttttttcgtttacagggcaaaagattacgcgcagaaaaaaaggatctcaagaagatcctttgatcttttctactgaaccgctctagatcaagccacttcctttttgcattgacgcagggtgtcggaaggcaactcgccgaacgcgctcctatagttttcagcgaagcgtcccaaatgtaagaagccgtagtctagggctatctcagttatactacgcacattggcactgggatcgttcaagcaggcgcggatgctttcgagcttgcggttgcggatgtagttcttcggcgtggtgccggcgtgcttctcgaacaaattgtagagcgagcgtggactcatcatcgccagctccgctaaccgctcaaggctgatattccgtttgagattctcctcaatgaattgaacgactcgctcgaaagacgggttacctttgctgaaaatttcacggctgacattgctgcccagcatttcgagcagcttggaagcgatgatccccgcatagtgctcttggacccgaggcatcgactttgtatgttccgcttcgtcacaaactaacccgagtagattgataaagccatcgagttgctggagattgtgtcgcgcggcgaaacggataccctccctcggcttgtgccaattgttgtcactgcacgcccgatcaaggaccactgagggcaatttaacgataaatttctcgcaatcttctgaataggtcaggtcggcttggtcatccggattgagcagcaatagttcgcccggcgcaaaatagtgctcctggccatggccacgccacaggcaatggcctttgagtattatttgcagatgataacatgtttctaatccaggcgagattaccctcacgctaccgccgtagctgattcgacacagatcgaggcatccgaagattctgtggtgcagcctgcctgccgggcgcccgcccttgggcaggcgaatagagtgcgtaccgacatactggttaacataatcggagactgcatagggctcggcgtggacgaagatctgacttttctcgttcaataagcaaaaatccatagttcacggttctcttattttaatgtgggctgcttggtgtgatgtagaaaggcgccaagtcgatgaaaatgcatctcgacgtgatgcgtatacgggttacccccattgccacgttgcgccatcctttttgcaatcagtgaccacttttccaagcaaaaataacgccaagcagaacgaagacgttctttttaagaagcgagaacaccagaagttcgtgctgtcggggcatggggcgacgaattggcggataaaggggatctagtccagccttgcaagaagcggatacaggagtgcaaaaaatggctatctctagtaaggcctaccccttaggctttatgcaactagtgtgaactgccgagtaggtagctggaaattgctgggaggtttctacctgttgtggttgctggtgaactgccgagtaggtagctggaaattagccaattggaattccgagcgaaggagatatacatatgcattttttagttcaaacaaaactttatcctgatgaggctcttgaaagctatttgctaaggcttgctagggataactcatacgatggctatagtgagcttgctgatattttatggcaatggcttgtagagcaagatcatgatcttgaaggtgcgttgccgttagagctgggtaaagttgatgtttatcatgctaggcaagcgagtagctttagaataagagcgctcaagttggtagctcaattagctgatgtaaacgctggtaatattcttgcgcttgcatggcggcgcagtaattttaaatttggcaacttagtagcagtaagccgtaatgagcagacaattcctcttgagttacttcgcactgataatatacctgtttgcattgaatgcttgtttgaatcttcttacgttccttttcattggcatttaaagccctataagacgtgccataagcataaatcacaattaactacacattgtaaggaatgccataacttaattgattacagagcttctgaggagtttttagagtgcagttgtggttgtaaactaaccaatagtgaacagttaaacgatgcagactttaaaattgcatttgcgcttgcaagtagtaacagccataaaatagtggggttaatatcttggtttgcgaaggttaagcaacttgatgtaagcgatgctgactttaaccgtacttttgttgattactttagtacttggcctgaaagccttactactgaattagatttactcacaaacaatgcgcgcctcaagcaacttaacccttttaataaaactaagttcaactctgtttatggaaatgtgatccgtgatggtcaaatagctgcaacaagtaaccgtaaaaacaaagtacttgatgaactaattaaatattttgttgaattagttgatagtaatcctaaaactaaacatccaaatattgcagatttactgctttgtacttttgataccgcagtattattaaacaccaccacagagcaagtttataggcttcatcaagaaggctttttaaactgcgcttacccacaaaaaaagcacgaacagctcagagctgatagtcatgttttttatttacgccaagtgattgagctacagcaagcattcgcagctgaaacgcctcaaacaaaaaaacaatttatagcgccgtggtaacttatgaacttacaagatgcatttgcgattgaatcacttaaggaaaaaaccacagcacttagaaagttgtttactccatatatgtctcatgttgcggtagatggctttgaagaacaagcgctgactgtgctcattaacctagtttataaacgaagtgagattgatgatttaacaagtacaagaaccgctaaaagtgtattacgtgatgaagtgttactgagtaaatgtattaacgaagttaaatggtttcatactcataatttaaaatatcctgatatacgcgtaagccatcaacgtttaattagtaaggtagtaagtgaagatattgcgggtatttgtagccggtcattacctttaagttttggatggtcgcacaacagtgctgaaattaatcatgcaaagttatttttaacctcatttacttggcaaggtgaagtaacttgtttagcaaatttactaataaatgaggagcctgtttggattaatttaataaggacatacgggtttactaaaaaggcggttttaggcatcgcgggtaaaataaaacagcttttgccagtggcagaactcccattagaagtaagctctttttcaccacaattacaaatgccatttcagcaaagctaccttgcggttacgcctgtagtaagtcacgcaatgctggctaaaattcagcaattaacaacagatcgtaagttaaattttggtttagttgagcactcaagacctgccaatgttggcgatttagcaagctcagtaggtggtaatattagagtgctgcgttactttcctaaaacatattcaaaggctgttaactgctctgaagtattcaataatgatagtgagaaagcatttaaaattcgtgcgctattaaacagtcaatttcaacaggcgcttttggtattggtcggtattaaacagtttaatacgttaaggcaaaagcgattagcgcgagtagcggctattaggcaagtacgtgttagcttgcagttgtggctggataacattctggaagctaaaaataacgctcaagggcaagcctaccctgagtgggcaaagcattacttagatcagagtattactaactgcattagccaatttagtaacgtactaaatgagagccttggtaatttaagtaagctcaaacgctttgcgtatcaccctaatttaatgggggtgtttaaaacgcagttaaactatgtgtttactcactgtattcctgatgaagaaacattaaatgatgagcaaatagtgtatgtgcattgccaagatatgcgagtgtttgatgctgaggcaatggctaatccgtatattcaaggtatgccgtcacttacagctttaaatgggcttgctcataactttgagcgtaagctaaaaaattttatagacccttcaattaagtgtattggtagtgccattaacattgaaagttatcaactacatacaggtaaaccattacctgaaccaagtaagttaaaacaagttgctggccgtagtcatgtcataagatcaggaattatcgataaacctaaatgcgatataacactcgatttagtctttaggctttttgtaccaaacattaagctgttagataagttaaatagtcagcttgtgaaacccgcactaccatctatgtttgcaggcgggactatgcatccaccttcgttataccaaaatattgactggtgccatttacatactaaaccaagtgagctgtttaaaaatataaaggcaaaatcgttaaatggcagttggttgtacccttcaaaaaaagtagtcaaaagttttgaacagttgattgatgcgcttaacggtaactttaatttaagacctgctgccattggttttgctgcgcttgaagaacccataaagcgagatgtagccttacatgaataccattgttatgctgagcccgtaattgggcttttagagtgtgttagcaatacatcagttaagtacgcaggggctaagcagttcttccatgacgcattttgggttatggatgttcaaaaagagtctatgcttatgaaaaagtctaagtttgagtatgaataatgcaattacctcggcatttaagttacacgcgttcgctttcacccagtaaagcggtatttttttataaaacatcggagtctgattttgaaccgctgcaaatagagcaaaataagcttgttgggcaaaagtcagggtttggcgatgcgtatcaaaagcaaaatgtggctaaaaatttagcgccacaagatctagcgtttggaaacccacaaacgattgatgtgtgctacgtacctccagcagtaaatgagctattttgccgtttttcactcagggttgaggctaatagcaatgaaccacacgtttgtgatgaccctaaagttatttattggttaaaacggttttttgaaacctacaaaaaacacaatggtcttaatgaagttgcaactcgctatgctaaaaatatactgatggggaactggctttggcgtaaccgccaatcaccaaatgttgatattgaaatccttactgaacatgcagccccgatcattgttgaaggtgcacaaaaactaaaatggcaaggcaactggcaaaacaatcaaacagcattaataacattatcagaagctattcaagaagggcttagcaatcctcaaaattattgttatttagatataaccgcaaaaattaaaaatgcatttagccaagaggttcaccctagtcaaaagtttgtagacaatgttgaacaaggcatgtcatctaaacaacttgcatacactcaagtcggcgataaaaaagcagccagtttaaactcacaaaaagtaggggctgcgattcaaactattgatgattggtatgagggaggttacaaacctttacgcactcacgagtatggtgcagataagcaaatattagttgcacatagaacgcctaagagccattcagacttttattcattacttccgcgcattgccttgcatattaagcacatggaaaagcatggtttagagcaaagtgaagaatcaaacgcagttcactttattgcagcagtgttgatcaaaggcggcttgttccaaaggagtaaggcatgaagcgctattattttactattacttatttacctaaaaattgtgatgtaagcctccttgcagggcgttgtatcggcatattgcatgggtttatgagttcgcgtgaaattagtaatataggtgtgtgttttcctaaatggaatgagcaagagataggtaatgaattggcgtttgtatcgacagataaaaagcaattaaccaatctatctcagcaaagctattttgagatgatggctcaggataaattatttggcttatcaaaaatactcgaagtaccaacaaaccaaaatgaggttatgtttattcgcaaccaatcagtagctaaggcttttgttggcgaaaagcaaagacgtttaaaacgcgctaaaaaacgagctgaagccagaggtgaagtttataatcctgaatatcaatttgaggcaaaagacataggccattttcattcaatacctgtatcaagcaaagccaacggccaaagttatgttctgcatatacaaaaaattgaaaatactaatgcgacagaaaatcaatttaataattatggctttgctacaaatcaaacatttcaaggtacggttccttctttgaatacccaataacctttaataaggagatatagcatgtacagaagaaaactcaaacactcccgtgttaaaaaccttcataaatttgctagtcaaaaaaataaatctacctgtttagttgaatcctctttagagtttgatgcctgttttcattttgaattttcaccatcaatagccgcatttgaggcacaaccactaggttatgaatatgagtttgataaccgtatttgccgttacacacctgactttttacttacccacacagacggcacgcaaaaatttatagaagtaaaaccgcaaagcaaaattgctgacgaggactttcgtgcacgttttattgaaaagcaaaccatcgctaaacaagatggacgcgacttaatactggttactgataaacaaatccgtgtatacccaacactcaataacttaaaacttttacatcgctattctggttttcagtctttaacagagctgcaagcatcggtgctcgagcttgttaagcaatacggctctattaaagtgggccagttagttaactttttaaaagtaactgccggtgagctacttgctactgtgctacgcttattatcactagggcagttatttgccgacttaactacaaatgaaatatcaatagaaacagcaatttggtctaacaatgtttaatgacggtttgtttgatgatgagtttaaccagccattaccaaaagtagaaaccaaactacctcaaaattacgccaaagatttacaagcccttcctgaaaaaattaaaaatacaacatttgctaaacttaaatatattcaatggcttgaggctaatattcaaggtggctggacacaaaaaaaccttgagcctttattgaaagtaatgcctgaagttgagggtgaaaaaaagcctagctggagaacagctgcacgatggtatagcgcttatacaaatgcagataaaaatatcatggcgctaataccaagccatcaaaaaaagggtaacagggagcgcgatacagccaccgataagttttttgaaaaagcacttgagcgttacttagtaaaagaaaagccatcagtggcttctgcttacaagtattacgcagacttagttatcattgaaaacgacagcgttgtgggcagtgttttaaagcctttaacatacaaagcgtttaaaaatagaatcgataatttaccgcaatacgacgtgatggtttctcgctatggtaagcgtcttgctgatattgcttttaataaagtagaagggcatacacggcctacccgagtactcgaaaaagttgaaattgaccatacaccgcttgatcttattttattagatgatgagctacatatcccgcttggtaggccaacacttaccatgttagtcgatgtgtatagccattgtattgttggcttctactttagcttcagcgagcctagctatgatgcagtaaggcgagcaatgctaaatgcaatgaaacctaaaagtgatgtggcaaaactatacccagatacgataaatgagtggaaatgtgctggcaaaattgaaactctcgttgttgataatggcgctgaattttggagtaacagccttgaacttgcttgtgaagaaattggtattaatactcaatataaccctgttgcaaagccgtggttaaaaccctttgtagaacgtatgtttggcacaattaacactgaattattagaccctgttcctggtaaaaccttttctaacattttacaaaagcatgaatacaatcccaaaaaagatgcaatcatgcgctttacaacctttatgcagctattccataaatgggtagtagacgtttaccatcaagatgccgatagccgctttaagtacatacctagccaactatgggagcaaggctttaatacgttaccgccaacagtgctgagtaatgctgatcttcaacaattagatgttgtgctcagtatttcaaaccatagggtgcttcgtaaaggtggaatacggctagaaaatttaagctacgacagtactgaactagccaactatagaaaacagtttagccataaagtatctcaagaagttttaattaaattaaaccccgatgatatttcttatatatatgtttacctcgataagctagagcattacataaaagtgccatgcatagatccaaacggttacacccaaaatttaagtttgaatcagcataaaataaatatacgtattcatcgcgattttatttccggatctatcgataatgtaggcttagcaaaagcgcgtatgtttattcataataaaattcaaaacgagtttgaagagttaaaaaatgcaccaaaacactcaaaagtaaaagggggtaaagcattagctaagcatcaaaatgtaagtagtgactcacaaaaatcaatagctcagagcgagccattagaacccaaaaaggttacacctaaagagcaaccaacagatagctgggatgactttatttcagacctagatggattttaattatgctgaccgataaacaaaaagcaaaacttaatgaatttcgcgatgtatttattgaatacccaataataactactgtatttaacgactttgacagattaagacttggtaaaggattagcgggcgaaaagccctgcatgctgttaaatggcgatacaggcacaggtaaaacagcactaataaaacagtataaagaacgccatttaccgcaatttattaatggagtgatgaaccaccctgtattagtaagccgcatacctagtaacccgacactagaatctactttagccgagcttcttaaagacttagggcaagtaggtagtacagagcgcaagctgagaataaacggtacgcggttaacgacatcattaataaaatgcctaaaaacgtgtggcacagagcttataattattgatgagtttcaagagctgattgagcacaaccaaggtaaaaagcgccgcgagattgctaatcgattaaaatacattaacgatgaagcgggtgtatcgattgtattggtgggtatgccgtgggcagaaaaaatagcagacgaaccccagtggtcatcgcgtttattagtaaggcggcagctgccttattttaaattatcagaaaacccaaagcattttgtacagttaataattggcctagctaaccgtatgccattcaccgaaaagccaaaattaagtgagcaagcaacagtatttgctttgttctcattgtcaaaaggctgttttagaactcttaaatactttttagatgatgccgtactttatgcattaatggataacgcgaaaaccctcacaaccaagcatctagttaaagcatttggagtactgtttcctgatgtaccaaacctatttaccttgcccgttgcagaaattacagcaagtgaagttgagcgctattcactttataaacttgaaagcgcccaagatgaagatccgtttatagcgactaagtttactgaccaaatgccgattagtcagttgttgaggaagtaacctaggctgctgccaccgctgagcaataactagcataaccccttggggcctctaaacgggtcttgaggggttttttgctgaaacctcaggcatttgagaagcacacggtcacactgcttccggtagtcaataaacgaggaagcggaagagcactgccacccaaattcctcatttggtgttgtttgaagtataagttgacatatttgtactaaaagatggcataaattggaagtataaggtggcatagtctagtatttaaccaaatggttagatggttgactcacatgtacagaagaaaactcaaacactcccgtgttaaaaaccttcataaatttgctagtcaaaaaaataaatctacctgtttagttgaatcctctttagagtttgatgcctgttttcattttgaattttcaccatcaatagccgattagacggacgcaatcttgggatccgagccccaactggggtaacctttgagttctctcagttgggggagcacgtgttgacaattaatcatcggcatagtatatcggcatagtataatacgacaaggtgaggaactaaaccatgtcacatctcgcagaactggttgccagtgcgaaggcggccattagccaggcgtcagatgttgccgcgttagataatgtgcgcgtcgaatatttgggtaaaaaagggcacttaacccttcagatgacgaccctgcgtgagctgccgccagaagagcgtccggcagctggtgcggttatcaacgaagcgaaagagcaggttcagcaggcgctgaatgcgcgtaaagcggaactggaaagcgctgcactgaatgcgcgtctggcggcggaaacgattgatgtctctctgccaggtcgtcgcattgaaaacggcggtctgcatccggttacccgtaccatcgaccgtatcgaaagtttcttcggtgagcttggctttaccgtggcaaccgggccggaaatcgaagacgattatcataacttcgatgctctgaacattcctggtcaccacccggcgcgcgctgaccacgacactttctggtttgacactacccgcctgctgcgtacccagacctctggcgtacagatccgcaccatgaaagcccagcagccaccgattcgtatcatcgcgcctggccgtgtttatcgtaacgactacgaccagactcacacgccgatgttccatcagatggaaggtctgattgttgataccaacatcagctttaccaacctgaaaggcacgctgcacgacttcctgcgtaacttctttgaggaagatttgcagattcgcttccgtccttcctacttcccgtttgccgaaccttctgcagaagtggacgtcatgggtaaaaacggtaaatggctggaagtgctgggctgcgggatggtgcatccgaacgtgttgcgtaacgttggcatcgacccggaagtttactctggtttcggcttcgggatggggatggagcgtctgactatgttgcgttacggcgtcaccgacctgcgttcattcttcgaaaacgatctgcgtttcctcaaacagtttaaataaggaggacaatcatgattgaacaagatggattgcacgcaggttctccggccgcttgggtggagaggctattcggctatgactgggcacaacagacaatcggctgctctgatgccgccgtgttccggctgtcagcgcaggggcgcccggttctttttgtcaagaccgacctgtccggtgccctgaatgaactgcaggacgaggcagcgcggctatcgtggctggccacgacgggcgttccttgcgcagctgtgctcgacgttgtcactgaagcgggaagggactggctgctattgggcgaagtgccggggcaggatctcctgtcatctcaccttgctcctgccgagaaagtatccatcatggctgatgcaatgcggcggctgcatacgcttgatccggctacctgcccattcgaccaccaagcgaaacatcgcatcgagcgagcacgtactcggatggaagccggtcttgtcgatcaggatgatctggacgaagagcatcaggggctcgcgccagccgaactgttcgccaggctcaaggcgcgcatgcccgacggcgaggatctcgtcgtgacccatggcgatgcctgcttgccgaatatcatggtggaaaatggccgcttttctggattcatcgactgtggccggctgggtgtggcggaccgctatcaggacatagcgttggctacccgtgatattgctgaagagcttggcggcgaatgggctgaccgcttcctcgtgctttacggtatcgccgctcccgattcgcagcgcatcgccttctatcgccttcttgacgagttcttctgacctaggctcgagtaatggtttcttagacgtcttgacagctagctcagtcctaggtataatgctagcctgtcaccggatgtgctttccggtctgatgagtccgtgaggacgaaacagcctctacaaataattttgtttaatactagagaaagaggggaaatactagatggtgtcgaaaggtgaggagcttttcacgggggtggttccaatcttagtcgagcttgatggtgacgtgaatggccataagtttagcgtgcgcggcgagggtgagggcgatgcgacgaacggtaaacttactttaaagtttatttgtactacaggcaaattaccggtcccgtggccgaccctggtcactacgcttgggtatggggtagcatgttttgcccgttaccctgaccacatgaaacagcacgatttctttaaatctgccatgcccgaagggtatgttcaggagcgcactatcagttttaaagacgacggaacgtacaaaactcgtgctgaagtaaagttcgaaggtgatacccttgtgaaccgtatcgtccttaaaggcatcgacttcaaagaggacggtaacattttaggccacaaattagagtacaacttcaattcacataaggtttatatcacagcagataagcaaaaaaatggcatcaaggcaaattttaagacccgccacaacgtagaagatggtggagtccagttggcggaccactaccagcaaaatacaccgattggcgatggtccggttttgcttcccgacaatcactatcttagccaccagagtaaactgagtaaggacccaaatgaaaagcgcgaccacatggtattgaaagagcgcgttacagcagctggaattacacacgatatggacgaactttataagtaatagggataacagggtaatcgcaaaaaaccccgcttcggcggggttttttcgcgtttaaacgtgccagggcgtgcccttgggctccccgggcgcgttttttacgcgttctagagtccttactgcagtagttttgctgaaatactcgattcacaaaaatatcaacttatggttgttttgtgagatatcaatatatggttgttttgtggttaagttgctgattataaataattattaaatatcactttatggttgcatcaacaggtaccgagctctcatctgttacgctcggcgtgtagccggccagcctcgcagagcaggattcccgttgagcaccgccaggtgcgaataagggacagtgaagaaggaacacccgctcgcgggtgggcctacttcacctatcctgcccggctgatcgccgttggatacaccaaggaaagtctacacgaaccctttggcaaaatcctgtatatcgtgcgaaaaaggatggatataccgaaaaaatcgctataatgaccccgaagcagggttatgcagcggaaaagcgcttatcagcggtaccggtagctcggctgtgaatgaaatggacttaccaattaaagtaaaaggtgatgatttattcatcaaagtttttgtgccagtgtaaaccattttccaaactgtttaagagtgatttacaacgcgtagcatgtttactttgcgttttataaagctgtatttggtagctttatgccatctattgcttcaatactatgccaatatacacttcacttaccacgctgtaagttaataaaaccgagtttggttatgtcaacttatacttcaaacaacatttgggtgaaaatacattcctttttgacgtcaggtggcacttttcccggtaaaccagcaatagacataagcggctatttaacgaccctgccctgaaccgacgaccgggtcatcgtggccggatcttgcggcccctcggcttgaacgaattgttagacattatttgccgactaccttggtgatctcgcctttcacgtagtggacaaattcttccaactgatctgcgcgcgaggccaagcgatcttcttcttgtccaagataagcctgtctagcttcaagtatgacgggctgatactgggccggcaggcgctccattgcccagtcggcagcgacatccttcggcgcgattttgccggttactgcgctgtaccaaatgcgggacaacgtaagcactacatttcgctcatcgccagcccagtcgggcggcgagttccatagcgttaaggtttcatttagcgcctcaaatagatcctgttcaggaaccggatcaaagagttcctccgccgctggacctaccaaggcaacgctatgttctcttgcttttgtcagcaagatagccagatcaatgtcgatcgtggctggctcgaagatacctgcaagaatgtcattgcgctgccattctccaaattgcagttcgcgcttagctggataacgccacggaatgatgtcgtcgtgcacaacaatggtgacttctacagcgcggagaatctcgctctctccaggggaagccgaagtttccaaaaggtcgttgatcaaagctcgccgcgttgtttcatcaagccttacggtcaccgtaaccagcaaatcaatatcactgtgtggcttcaggccgccatccactgcggagccgtacaaatgtacggccagcaacgtcggttcgagatggcgctcgatgacgccaactacctctgatagttgagtcgatacttcggcgatcaccgcttccctcat

SEQ ID NO: 47 - DNA, 15655 bp, synthetic construct
  source 1..15655: mol_type = other DNA
gcgctgcggacacatacaaagttacccacagattccgtggataagcaggggactaacatgtgaggcaaaacagcagggccgcgccggtggcgtttttccataggctccgccctcctgccagagttcacataaacagacgcttttccggtgcatctgtgggagccgtgaggctcaaccatgaatctgacagtacgggcgaaacccgacaggacttaaagatccccaccgtttccggcgggtcgctccctcttgcgctctcctgttccgaccctgccgtttaccggatacctgttccgcctttctcccttacgggaagtgtggcgctttctcatagctcacacactggtatctcggctcggtgtaggtcgttcgctccaagctgggctgtaagcaagaactccccgttcagcccgactgctgcgccttatccggtaactgttcacttgagtccaacccggaaaagcacggtaaaacgccactggcagcagccattggtaactgggagttcgcagaggatttgtttagctaaacacgcggttgctcttgaagtgtgcgccaaagtccggctacactggaaggacagatttggttgctgtgctctgcgaaagccagttaccacggttaagcagttccccaactgacttaaccttcgatcaaaccacctccccaggtggttttttcgtttacagggcaaaagattacgcgcagaaaaaaaggatctcaagaagatcctttgatcttttctactgaaccgctctagatcaagccacttcctttttgcattgacgcagggtgtcggaaggcaactcgccgaacgcgctcctatagttttcagcgaagcgtcccaaatgtaagaagccgtagtctagggctatctcagttatactacgcacattggcactgggatcgttcaagcaggcgcggatgctttcgagcttgcggttgcggatgtagttcttcggcgtggtgccggcgtgcttctcgaacaaattgtagagcgagcgtggactcatcatcgccagctccgctaaccgctcaaggctgatattccgtttgagattctcctcaatgaattgaacgactcgctcgaaagacgggttacctttgctgaaaatttcacggctgacattgctgcccagcatttcgagcagcttggaagcgatgatccccgcatagtgctcttggacccgaggcatcgactttgtatgttccgcttcgtcacaaactaacccgagtagattgataaagccatcgagttgctggagattgtgtcgcgcggcgaaacggataccctccctcggcttgtgccaattgttgtcactgcacgcccgatcaaggaccactgagggcaatttaacgataaatttctcgcaatcttctgaataggtcaggtcggcttggtcatccggattgagcagcaatagttcgcccggcgcaaaatagtgctcctggccatggccacgccacaggcaatggcctttgagtattatttgcagatgataacatgtttctaatccaggcgagattaccctcacgctaccgccgtagctgattcgacacagatcgaggcatccgaagattctgtggtgcagcctgcctgccgggcgcccgcccttgggcaggcgaatagagtgcgtaccgacatactggttaacataatcggagactgcatagggctcggcgtggacgaagatctgacttttctcgttcaataagcaaaaatccatagttcacggttctcttattttaatgtgggctgcttggtgtgatgtagaaaggcgccaagtcgatgaaaatgcatctcgacgtgatgcgtatacgggttacccccattgccacgttgcgccatcctttttgcaatcagtgaccacttttccaagcaaaaataacgccaagcagaacgaagacgttctttttaagaagcgagaacaccagaagttcgtgctgtcggggcatggggcgacgaattggcggataaaggggatctagtccagccttgcaagaagcggatacaggagtgcaaaaaatggctatctctagtaaggcctaccccttaggctttatgcaagtcgacgtgacctgccgtataggcagctgaaaatttcaggccggcaagctccacaaggtcatcactgtgacctgccgtataggcagctgaaaattagcgaattccgagcgaaggagatatacatatggcttttctattttctcccaaggctcgggcattttctgacgaatcgctggaaagttacttgttacgggtcgtttcagagaatttttttgactcgtatgaagggctcagcttagctattcgcgaagagctgcatgagcttgattttgaggcgcatggtgcattcccagtagatttaaagaggctcaatgtttaccacgccaaacataatagccattttaggatgcgggctttaggactactcgaaacactactagatttacctcgatacgagctacaaaagttggctttgctaaagtcagatattaaatttaactcctccgtcgctttatataacaatggcgtagacattcccctgaggtttattcgtcaccacgccgaggaagctgttgattcgattccggtatgctcacaatgtcttgcagaagaagcctatataaaacaaagttggcatataaagtgggtaaatgcatgcactaaacatcagtgtgctttgctacataactgcccagaatgctacgctccaattaactatatcgagaatgagtcaattactcattgttcatgcggttttgagctgtcttgcgctagtacctcgcctgtaaatacgttaagtattgaacatttaaataaattactggataaaggtgagcgcaacgatagtaacccgctatttaacaatatgactcttacagaacgttttgctgcgcttctttggtatcaggagcggtattctcaaacagataacttttgtttaaatgatgctgtgaactattttagtaaatggccagcagtttttaatacagagcttgatgaactaagtaaaaatgcagaaatgaagttaatagatctgtttaataaaactgagtttaagtttatttttggggatgctattttagcttgccccagtactcaaaagcagagtgaatctcactttatttatagggctctattagattatttagttactttagttgagagtaaccctaaaactaaaaagcccaacgcagccgacttattagtaagtgtattggaggctgcaactttattaggtacttcagtagagcaggtttataggttgtaccaaaatggtattttgcaaacggcatttcgtcataaaatgaaccagcggatcaacccttataagggcgcgttttttttaagacatgttatagagtacaaaaccagttttggaaatgacaaagctagaatgtatttgtcggcatggtgagtatatgcatcttaaggaactgctagagattacagacaccactgagcgggataggtcattacgtcgtgcttttagcccttatacggcaatgattgatataacaggcagcgaagccgttgccctgattattttgttaaacctgacttatcgaaaaaaccaagttgatgacttgctggataaaaagctcgcaaaacaggctttaaaaagtgaagaccatattaataaatgtattaaggaaatagcgtggtttcatactcataatttaaagtaccctgacattagagtcagtaagcaaaatttagccgtagagcctccaacactgcactcttatgttttgagtagtgctaactatcctaaagcctatggctggtcacataactcagctaaagttaattttgctaaattatttgttagttactttaaatggcaaaatcaagtcagttggctggcacaagtattagctacgaactcggataactggaaatccgcatttacctctcttgggttatccgttaaggcatttaaaagtttatgtgtaaccgttaaaaattcattgcctgaagaggccattcccgactctgttgaccgctactctcgccaaattagaatgccttatcatgatggttacttagctgttacgcctgtaattagccatgttgttcaatcaaaaattcaacaggcggcaattgataaacgagcccgatttagcaatgtagagtttacgcgtcctgctgctgtcagtatgttagctgcttccttaggtggtgttattaatgtgcttaattaccctccttatatacgaagtaaatatcatggtttaagtaactcacgagcatttaaattaaataatgggcaaacagtatttaacgttgaggcactattaaagccggaattaattaaagccttagaaggtattatatttagtaataatgcgctggctcttaaacagcgtagacaacaaaaagtaaaaaatattaaagagctgagaaacacgcttttagaatggttttcacctgtatttgaatggcgcttggacgctattgagaatgggtatgacttagaacagcttgagagtgcttcagagcgactagagtataaaatactatcgctacccgacaatgaactcccttcgctaacgattcctttatttaggttactaaatgaaatgcttggcggtgtgagcatgacacaaaggtatgcttttcatcctaaattaatgagccctttaaaagcagctttacaatggttgcttgttaatcttacagatcaaaaacatgtactgattgaagaagatgatgaacattatcgctatcttcatttaagcggtatacgtgtgtttgatgcgcaagcattatcaaacccttactgctcaggtattccatctttaaccgctgtttggggtatgattcacagctaccaaagaaaacttaatgaggcgctaggaacaaatgtacggttcacatccttttcttggtttattaggaattattctgctgtagcaggaaaaaaacttcctgaactgagccttcaaggcgctcagcaaagtaggctcaagcggccaggaattatcgatggcaaatactgtgatttggtatttgatttaataatacacattgatggttatgaagatgacttacaggcagtagatagtaagcctgacattttgaaagcgcattttccatctaactttgcaggtggtgttatgcatcagcctgagcttaactcaaatataaattggtgctgtttatatagtaatgaaaatcagttatttgaaaagttaaggcgactccctttatctggttgttgggttatgccaactgagcacaaaatacaggatttagatgagctactcttattattaaatagtgactctaaactaagcccatctatgatgggatatatgttactcaccgaaccgatggctagagttggatcacttgaaagactgcattgttatgctgaaccagcaataggagtggtgaaatacgaagcggccactagtgtaaggctaaaaggtattggtaactattttaatagcgctttttggatgctagatgcacaagaaaagtttatgctaatgaaaaaagtttaaccggaaaatacttaatggagctctgtaatatattaaaatatgatcgctcgctttaccctggtaaagctgtgtttttttataaaacggctgactctgattttgttccactagaggctgatattaataaaattcgaggccctaaatctggttttactgaagcattcaccccacagttttccccaaaaaacatctcacctcaggacttaacacataataatatattaactctcgaagagtgttatgtacctccaaatgtggagcatatattttgtcggttttctttgagagtacaggctaactcgttggtcccttcaggctgtagtgatccagaggttttttctttattaaaagagttggcagaaacatttaaagaatgcggtggttataaagaactagcagtaagatattgtcgaaatattttgataggtacatggctttggcgtaatcaaaacaccggcaacactcaaattgaaattaaaaccagcaaagggagttgttatttaatcgataacactcgtaagttagcttgggaaagcaaatgggcttctgatgatctaaaagtattggaagagcttagtaatgaaattgagagcgcattaactgatcccaatgtgttttggagtgctgatataaccgcgaaaatagaagcctcattttgccaagagatttacccaagccaaatccttaacgacaaggttaagcaaggagaggcctcaaaacagtttgtaaaagctaagtgtgcagatggccgttacgctgtaagttttaattcagtaaaaataggagcagcccttcagtcaatagatgattggtgggatgaggatgcaagtaaaagattacgagtgcatgagtttggtgctgataaagaaataggggttgcccgacgtcctcctgattctgaacagaatttttattctattttcaaaaatacggaatggtatttgtcagcccttaaaaattgcattactaataaaaatgaaaaaatagacccagctatttattacttattctctgtattgattaagggcggaatgttccagaaaaaagcagaggctaaaaaggcgtaattatgcaaaggtattacttcacagtccactttttaccaaaacaagctaatctagcgctgcttactggccgttgtatttctattatgcatgggtttattttgaagcataatattgaaggaatgggggttacgtttcctgcatggtcggactcatcaattggtaatgaaattgcttttgtttacacggacaaggagattttaaatacccttaaagatcaggcatattttgtggacatgcaagattgtggcttttttaaagtaagccaagttttagctgtacctgacagctgcgaagaagtacgttttatacgtaatcaggcggtagcaaaaattttcacaggtgaaagtagaagaagattaaagcgcctgcaaaaaagagcgttagcaagaggtgaagattttaatcctaaaaagatcgaagctccccgagagattgatattttccatagagtggctatgactagtaagagttcacaagaggattatattctgcatattcaaaagcaagatgttgactgccaagctgagccatactttagtaattatgggcttgcctcaaatgaaaagtttaaaggcacggttccggatttatcaccctcaatagatagaaattaacctttaataaggagatatagcatgtatatacgcaacttgagaaagccatctccaaataaaaatgtatttaaatttgcgagcactaaagttagtagtgtagttatgtgtgagagttcattagagtttgatgcatgttttcatcatgaatataacgatttgatagagagttttgggagtcagcctgaaggctttaaatatgagtttatgggtaaaagtttaccttacacaccagatgcactgatttcatatacagataaaacccaaaaataccacgaatataagccctattctaaaattgcttctccactatttagagctgaatttgctgccaaaagagctgcatcattaaaattggggattgatcttgttttagtaactgataggcaaattagggtaaatccaatattaaacaacttaaagttattacaccgctactcaggtgtttatggtatcagcggcattcaaaaagagttgctcagttttattcataaatcaggggtaatcaagctaaatgatataagctctcaggttgggataccaattggtgaaacacgatcttttttatttgggctcatgcataaagggttggttaaggctgatctagggtgtgatgatttaactaataatccaacattatgggctacaccatgactgacttttttaatgaatttgatgaaagcctggtaccattaaagccacaaacgcccacacaatacgtcaaattagatgatgccaacttaatccagcgtgatttggataccttttcagatacctttaaaaaccaagcactacaaaggtataagctaattagcactatagataaaaaactttcacgcggctggacccaacgaaatttagatcctattttagatgagctttttaaaggaggtgacgtagttcggccaaattggcgaactgttgctcgttggcgcaaaaaatatatcgaaagcaacggtgatatagcctcccttgctgataaaaaccacaaaatgggaaacagaactaaccgtataaaaggggatgataaattttttgataaagcattagaacgatttttagatgctaaaagacctactatagcaactgcatatcagtactataaagaccttattgttattgaaaatgagagtattgtcgaaggcaagattccaataatatcctacaatgcgtttaataaaagaatcaaagcaatacccccatacgcggtcgcggtcgcaaggcatggtaaatttaaagcagaccaatggtttgcttactgcgctgcgcacgtacccccgacaagaatattagagcgtgtagagattgatcatacaccacttgatttaatcctacttgatgatgagttacttattcccataggaagaccttacctaacattacttattgatgtatttagtggctgtgttcttggttttcatcttagttataaatccccttcctacgtatctgctgctaaggctattactcatgcgattaaaccaaagtctcttgatgctctgaatatagaactacaaaatgattggccttgctttggtaaatttgaaaatttagttgtagataatggtgctgagttttggtctaaaaacttagagcatgcttgtcagtcagcaggaataaatatccaatataaccctgtgcgcaagccttggctaaaaccctttatagagcgtttttttggggtgatgaatgaatatttcttacctgaattaccaggaaagacattttcaaatattttagaaaaagaagagtataaacctgagaaagatgcaattatgcgcttctcaacttttgttgaagaatttcaccgctggatcgcggatgtgtatcatcaagacagtaattcacgtgaaactcgaatcccaattaaacgttggcaacaagggtttgatgcatatcccccattgaccatgaatgaagaggaggaaacgcgtttttcaatgttaatgcgcatctcagactcaagaacgttaacgagaaatgggtttaaatatcaagagttaatgtatgactcaacagctttggctgattatcgtaaacattatccgcaaacaaaagaaactgtaaaaaaactgattaaagtagaccctgatgacatctcaaaaatttatgtttatttagaagagttagaaagttatctcgaagtaccgtgtacagatcctaccggctatacggatggtttaagtatctatgagcataaaacaataaaaaaaattaacagggaagtcatacgggaatctaaagatagtttgggcttagcgaaagcacgcatggctattcatgagcgagtaaagcaagagcaagaagttttcattgaatcaaaaactaaagctaagataacagctgttaaaaagcaagctcaaatagctgatgtaagtaatacaggaacgagcactattaaggtttctgaagaaagtgcagcccctgtgcaaaaacatataagtaacgataattctgacgactgggatgatgacttagaggcatttgaatgaatgccttaacagagatacagatagagaagcttcggaactttagcgattgcatcgttatgcacccgcaaattaaaacaatttttaatgactttgatgaattaagattaaaccgtaaatttcagtcagaccaacagtgtatgctattaattggtgatacaggtgttggaaaaagtcataccattaatcactacaaaaaaagagttctagctacacagaattatagtcgaaacactatgccagtcttagtaagtcgtatatctagggggaaaggcttagatgctactttagtccaaatgctggcagatctggagctatttggaagtagtcaaattaaaaagcgaggctacaaaacagaccttactaaaaagctcgtagagagcttaattaaagctcaagtagagctactcatcattaatgagtttcaggagttaatagagtttaaaagcgtacaagaacgacaacaaattgcaaatgggttaaagtttattagtgaagaggccaaagtgccaatagtactggttggtatgccttgggctgcaaaaatagctgaagaacctcaatgggcttctcgcttagttagaaaaagaaaacttgaatactttagcctaaaaaatgacagcaagtactttcgccaatatttgatggggttagctaagaaaatgccatttgatgtacctcctaagctcgaaagtaaaaataccacaatagcgttgtttgctgcatgtcgaggtgagaatcgagcccttaaacatctactgttggaggctttaaaattagcactaagttgtaatgagtatcttgaaaataaacattttattactgcttatgacaagtttgatttttttaatgataaggaaaaactaaaatcaaaaaatccttttaaacaagacattaaagatattgaaatttatgaggtaatcaaaaactcatcttataacccaaatgcattagacccagaagatatgctcacagatcgagtgtttgcaatagtaaagtaacctaggctgctgccaccgctgagcaataactagcataaccccttggggcctctaaacgggtcttgaggggttttttgctgaaacctcaggcatttgagaagcacacggtcacactgcttccggtagtcaataaacgaggaagcggaagagcgtgttgatcggctttaaggatctagtgtcgctgcaaccatagtttgacataatgcaaccataccttgacataattaaagtcatactctgacataaagccccttattaaaaatgatgctaaaaataaattccattataatcaattatttaagaattaattaaaccatagtgtgacatagtggctttttatttgtatagtatgtgtactcaaataataaaaatttacttatgtatatacgcaacttaagaaagccatctccaaataaaaatgtatttaagaggcagtccctcttagaggatcctactaggagcacgtgttgacaattaatcatcggcatagtatatcggcatagtataatacgacaaggtgaggaactaaaccatgaacatcaaaaagtttgcaaaacaagcaacagtattaacctttactaccgcactgctggcaggaggcgcaactcaagcgtttgcgaaagaaacgaaccaaaagccatataaggaaacatacggcatttcccatattacacgccatgatatgctgcaaatccctgaacagcaaaaaaatgaaaaatataaagttcctgagttcgattcgtccacaattaaaaatatctcttctgcaaaaggcctggacgtttgggacagctggccattacaaaacactgacggcactgtcgcaaactatcacggctaccacatcgtctttgcattagccggagatcctaaaaatgcggatgacacatcgatttacatgttctatcaaaaagtcggcgaaacttctattgacagctggaaaaacgctggccgcgtctttaaagacagcgacaaattcgatgcaaatgattctatcctaaaagaccaaacacaagaatggtcaggttcagccacatttacatctgacggaaaaatccgtttattctacactgatttctccggtaaacattacggcaaacaaacactgacaactgcacaagttaacgtatcagcatcagacagctctttgaacatcaacggtgtagaggattataaatcaatctttgacggtgacggaaaaacgtatcaaaatgtacagcagttcatcgatgaaggcaactacagctcaggcgacaaccatacgctgagagatcctcactacgtagaagataaaggccacaaatacttagtatttgaagcaaacactggaactgaagatggctaccaaggcgaagaatctttatttaacaaagcatactatggcaaaagcacatcattcttccgtcaagaaagtcaaaaacttctgcaaagcgataaaaaacgcacggctgagttagcaaacggcgctctcggtatgattgagctaaacgatgattacacactgaaaaaagtgatgaaaccgctgattgcatctaacacagtaacagatgaaattgaacgcgcgaacgtctttaaaatgaacggcaaatggtacctgttcactgactcccgcggatcaaaaatgacgattgacggcattacgtctaacgatatttacatgcttggttatgtttctaattctttaactggcccatacaagccgctgaacaaaactggccttgtgttaaaaatggatcttgatcctaacgatgtaacctttacttactcacacttcgctgtacctcaagcgaaaggaaacaatgtcgtgattacaagctatatgacaaacagaggattctacgcagacaaacaatcaacgtttgcgcctagcttcctgctgaacatcaaaggcaagaaaacatctgttgtcaaagacagcatccttgaacaaggacaattaacagttaacaaataaggaggacaatcatgaaatctaacaatgcgctcatcgtcatcctcggcaccgtcaccctggatgctgtaggcataggcttggttatgccggtactgccgggcctcttgcgggatatcgtccattccgacagcatcgccagtcactatggcgtgctgctagcgctatatgcgttgatgcaatttctatgcgcacccgttctcggagcactgtccgaccgctttggccgccgcccagtcctgctcgcttcgctacttggagccactatcgactacgcgatcatggcgaccacacccgtcctgtggatcctctacgccggacgcatcgtggccggcatcaccggcgccacaggtgcggttgctggcgcctatatcgccgacatcaccgatggggaagatcgggctcgccacttcgggctcatgagcgcttgtttcggcgtgggtatggtggcaggccccgtggccgggggactgttgggcgccatctccttgcatgcaccattccttgcggcggcggtgctcaacggcctcaacctactactgggctgcttcctaatgcaggagtcgcataagggagagcgtcgaccgatgcccttgagagccttcaacccagtcagctccttccggtgggcgcggggcatgactatcgtcgccgcacttatgactgtcttctttatcatgcaactcgtaggacaggtgccggcagcgctctgggtcattttcggcgaggaccgctttcgctggagcgcgacgatgatcggcctgtcgcttgcggtattcggaatcttgcacgccctcgctcaagccttcgtcactggtcccgccaccaaacgtttcggcgagaagcaggccattatcgccggcatggcggccgacgcgctgggctacgtcttgctggcgttcgcgacgcgaggctggatggccttccccattatgattcttctcgcttccggcggcatcgggatgcccgcgttgcaggccatgctgtccaggcaggtagatgacgaccatcagggacagcttcaaggatcgctcgcggctcttaccagcctaacttcgatcactggaccgctgatcgtcacggcgatttatgccgcctcggcgagcacatggaacgggttggcatggattgtaggcgccgccctataccttgtctgcctccccgcgttgcgtcgcggtgcatggagccgggccacctcgacctgatgtccgatcatctgttacgccggcggtagccggccagcctcgcagagcaggattcccgttgagcaccgccaggtgcgaataagggacagtgaagaaggaacacccgctcgcgggtgggcctacttcacctatcctgcccggctgacgccgttggatacaccaaggaaagtctacacgaaccctttggcaaaatcctgtatatcgtgcgaaaaaggatggatataccgaaaaaatcgctataatgaccccgaagcagggttatgcagcggaaaagcgctctttgttgatacaaccataaaatgataattacacccataaattgataattatcacacccataaattgatattgcctcttcatggtctaaacttcagtaagtttacgacattttcctcgaggtcatttccggggatccgcgatcgcttctccttacgcatctgtgcggtatttcaggtaccctgcccaagtcttatgaatgccgtataggcagctgaagataaaaacaatcgattcgatgtttaagttaatgtaattctgccgaaaaggcagtgagtagtaattgaaaaaaccagtcttatatccgggctggtttttttgtttttagcgttataacttttatttcactatgtcactgtatggttgcattttatgtcagtgaatggttgcaggttttttgtaagttattgatatgcctatccagtgtatgtcacgctttgcttgcagcgacatctaggatcttagcgcgcttttatggacgtcaggtggcacttttcccggtaaaccagcaatagacataagcggctatttaacgaccctgccctgaaccgacgaccgggtcatcgtggccggatcttgcggcccctcggcttgaacgaattgttagacattatttgccgactaccttggtgatctcgcctttcacgtagtggacaaattcttccaactgatctgcgcgcgaggccaagcgatcttcttcttgtccaagataagcctgtctagcttcaagtatgacgggctgatactgggccggcaggcgctccattgcccagtcggcagcgacatccttcggcgcgattttgccggttactgcgctgtaccaaatgcgggacaacgtaagcactacatttcgctcatcgccagcccagtcgggcggcgagttccatagcgttaaggtttcatttagcgcctcaaatagatcctgttcaggaaccggatcaaagagttcctccgccgctggacctaccaaggcaacgctatgttctcttgcttttgtcagcaagatagccagatcaatgtcgatcgtggctggctcgaagatacctgcaagaatgtcattgcgctgccattctccaaattgcagttcgcgcttagctggataacgccacggaatgatgtcgtcgtgcacaacaatggtgacttctacagcgcggagaatctcgctctctccaggggaagccgaagtttccaaaaggtcgttgatcaaagctcgccgcgttgtttcatcaagccttacggtcaccgtaaccagcaaatcaatatcactgtgtggcttcaggccgccatccactgcggagccgtacaaatgtacggccagcaacgtcggttcgagatggcgctcgatgacgccaactacctctgatagttgagtcgatacttcggcgatcaccgcttccctcatactcttcctttttcaatattattgaagcatttatcagggttattgtctcatgagcggatacatatttgaatgtatttagaaaaataaacaaatagctagctcactcggtcgctacgctccgggcgtgagactgcggcgg

SEQ ID NO: 48 - DNA, 15683 bp, synthetic construct
  source 1..15683: mol_type = other DNA
actcttcctttttcaatattattgaagcatttatcagggttattgtctcatgagcggatacatatttgaatgtatttagaaaaataaacaaatagctagctcactcggtcgctacgctccgggcgtgagactgcggcgggcgctgcggacacatacaaagttacccacagattccgtggataagcaggggactaacatgtgaggcaaaacagcagggccgcgccggtggcgtttttccataggctccgccctcctgccagagttcacataaacagacgcttttccggtgcatctgtgggagccgtgaggctcaaccatgaatctgacagtacgggcgaaacccgacaggacttaaagatccccaccgtttccggcgggtcgctccctcttgcgctctcctgttccgaccctgccgtttaccggatacctgttccgcctttctcccttacgggaagtgtggcgctttctcatagctcacacactggtatctcggctcggtgtaggtcgttcgctccaagctgggctgtaagcaagaactccccgttcagcccgactgctgcgccttatccggtaactgttcacttgagtccaacccggaaaagcacggtaaaacgccactggcagcagccattggtaactgggagttcgcagaggatttgtttagctaaacacgcggttgctcttgaagtgtgcgccaaagtccggctacactggaaggacagatttggttgctgtgctctgcgaaagccagttaccacggttaagcagttccccaactgacttaaccttcgatcaaaccacctccccaggtggttttttcgtttacagggcaaaagattacgcgcagaaaaaaaggatctcaagaagatcctttgatcttttctactgaaccgctctagatcaagccacttcctttttgcattgacgcagggtgtcggaaggcaactcgccgaacgcgctcctatagttttcagcgaagcgtcccaaatgtaagaagccgtagtctagggctatctcagttatactacgcacattggcactgggatcgttcaagcaggcgcggatgctttcgagcttgcggttgcggatgtagttcttcggcgtggtgccggcgtgcttctcgaacaaattgtagagcgagcgtggactcatcatcgccagctccgctaaccgctcaaggctgatattccgtttgagattctcctcaatgaattgaacgactcgctcgaaagacgggttacctttgctgaaaatttcacggctgacattgctgcccagcatttcgagcagcttggaagcgatgatccccgcatagtgctcttggacccgaggcatcgactttgtatgttccgcttcgtcacaaactaacccgagtagattgataaagccatcgagttgctggagattgtgtcgcgcggcgaaacggataccctccctcggcttgtgccaattgttgtcactgcacgcccgatcaaggaccactgagggcaatttaacgataaatttctcgcaatcttctgaataggtcaggtcggcttggtcatccggattgagcagcaatagttcgcccggcgcaaaatagtgctcctggccatggccacgccacaggcaatggcctttgagtattatttgcagatgataacatgtttctaatccaggcgagattaccctcacgctaccgccgtagctgattcgacacagatcgaggcatccgaagattctgtggtgcagcctgcctgccgggcgcccgcccttgggcaggcgaatagagtgcgtaccgacatactggttaacataatcggagactgcatagggctcggcgtggacgaagatctgacttttctcgttcaataagcaaaaatccatagttcacggttctcttattttaatgtgggctgcttggtgtgatgtagaaaggcgccaagtcgatgaaaatgcatctcgacgtgatgcgtatacgggttacccccattgccacgttgcgccatcctttttgcaatcagtgaccacttttccaagcaaaaataacgccaagcagaacgaagacgttctttttaagaagcgagaacaccagaagttcgtgctgtcggggcatggggcgacgaattggcggataaaggggatctagtccagccttgcaagaagcggatacaggagtgcaaaaaatggctatctctagtaaggcctaccccttaggctttatgcaactagtgtgaactgccgagtaggtagctggaaatgatcaaccgctgatcagcggttgcctgtgttggtgaactgccgagtaggtagctggaaattagccaattggaattccgagcgaaggagatatacatatgcattttttagttcaaacaaaactttatcctgatgaggctcttgaaagctatttgctaaggcttgctagggataactcatacgatggctatagtgagcttgctgatattttatggcaatggcttgtagagcaagatcatgatcttgaaggtgcgttgccgttagagctgggtaaagttgatgtttatcatgctaggcaagcgagtagctttagaataagagcgctcaagttggtagctcaattagctgatgtaaacgctggtaatattcttgcgcttgcatggcggcgcagtaattttaaatttggcaacttagtagcagtaagccgtaatgagcagacaattcctcttgagttacttcgcactgataatatacctgtttgcattgaatgcttgtttgaatcttcttacgttccttttcattggcatttaaagccctataagacgtgccataagcataaatcacaattaactacacattgtaaggaatgccataacttaattgattacagagcttctgaggagtttttagagtgcagttgtggttgtaaactaaccaatagtgaacagttaaacgatgcagactttaaaattgcatttgcgcttgcaagtagtaacagccataaaatagtggggttaatatcttggtttgcgaaggttaagcaacttgatgtaagcgatgctgactttaaccgtacttttgttgattactttagtacttggcctgaaagccttactactgaattagatttactcacaaacaatgcgcgcctcaagcaacttaacccttttaataaaactaagttcaactctgtttatggaaatgtgatccgtgatggtcaaatagctgcaacaagtaaccgtaaaaacaaagtacttgatgaactaattaaatattttgttgaattagttgatagtaatcctaaaactaaacatccaaatattgcagatttactgctttgtacttttgataccgcagtattattaaacaccaccacagagcaagtttataggcttcatcaagaaggctttttaaactgcgcttacccacaaaaaaagcacgaacagctcagagctgatagtcatgttttttatttacgccaagtgattgagctacagcaagcattcgcagctgaaacgcctcaaacaaaaaaacaatttatagcgccgtggtaacttatgaacttacaagatgcatttgcgattgaatcacttaaggaaaaaaccacagcacttagaaagttgtttactccatatatgtctcatgttgcggtagatggctttgaagaacaagcgctgactgtgctcattaacctagtttataaacgaagtgagattgatgatttaacaagtacaagaaccgctaaaagtgtattacgtgatgaagtgttactgagtaaatgtattaacgaagttaaatggtttcatactcataatttaaaatatcctgatatacgcgtaagccatcaacgtttaattagtaaggtagtaagtgaagatattgcgggtatttgtagccggtcattacctttaagttttggatggtcgcacaacagtgctgaaattaatcatgcaaagttatttttaacctcatttacttggcaaggtgaagtaacttgtttagcaaatttactaataaatgaggagcctgtttggattaatttaataaggacatacgggtttactaaaaaggcggttttaggcatcgcgggtaaaataaaacagcttttgccagtggcagaactcccattagaagtaagctctttttcaccacaattacaaatgccatttcagcaaagctaccttgcggttacgcctgtagtaagtcacgcaatgctggctaaaattcagcaattaacaacagatcgtaagttaaattttggtttagttgagcactcaagacctgccaatgttggcgatttagcaagctcagtaggtggtaatattagagtgctgcgttactttcctaaaacatattcaaaggctgttaactgctctgaagtattcaataatgatagtgagaaagcatttaaaattcgtgcgctattaaacagtcaatttcaacaggcgcttttggtattggtcggtattaaacagtttaatacgttaaggcaaaagcgattagcgcgagtagcggctattaggcaagtacgtgttagcttgcagttgtggctggataacattctggaagctaaaaataacgctcaagggcaagcctaccctgagtgggcaaagcattacttagatcagagtattactaactgcattagccaatttagtaacgtactaaatgagagccttggtaatttaagtaagctcaaacgctttgcgtatcaccctaatttaatgggggtgtttaaaacgcagttaaactatgtgtttactcactgtattcctgatgaagaaacattaaatgatgagcaaatagtgtatgtgcattgccaagatatgcgagtgtttgatgctgaggcaatggctaatccgtatattcaaggtatgccgtcacttacagctttaaatgggcttgctcataactttgagcgtaagctaaaaaattttatagacccttcaattaagtgtattggtagtgccattaacattgaaagttatcaactacatacaggtaaaccattacctgaaccaagtaagttaaaacaagttgctggccgtagtcatgtcataagatcaggaattatcgataaacctaaatgcgatataacactcgatttagtctttaggctttttgtaccaaacattaagctgttagataagttaaatagtcagcttgtgaaacccgcactaccatctatgtttgcaggcgggactatgcatccaccttcgttataccaaaatattgactggtgccatttacatactaaaccaagtgagctgtttaaaaatataaaggcaaaatcgttaaatggcagttggttgtacccttcaaaaaaagtagtcaaaagttttgaacagttgattgatgcgcttaacggtaactttaatttaagacctgctgccattggttttgctgcgcttgaagaacccataaagcgagatgtagccttacatgaataccattgttatgctgagcccgtaattgggcttttagagtgtgttagcaatacatcagttaagtacgcaggggctaagcagttcttccatgacgcattttgggttatggatgttcaaaaagagtctatgcttatgaaaaagtctaagtttgagtatgaataatgcaattacctcggcatttaagttacacgcgttcgctttcacccagtaaagcggtatttttttataaaacatcggagtctgattttgaaccgctgcaaatagagcaaaataagcttgttgggcaaaagtcagggtttggcgatgcgtatcaaaagcaaaatgtggctaaaaatttagcgccacaagatctagcgtttggaaacccacaaacgattgatgtgtgctacgtacctccagcagtaaatgagctattttgccgtttttcactcagggttgaggctaatagcaatgaaccacacgtttgtgatgaccctaaagttatttattggttaaaacggttttttgaaacctacaaaaaacacaatggtcttaatgaagttgcaactcgctatgctaaaaatatactgatggggaactggctttggcgtaaccgccaatcaccaaatgttgatattgaaatccttactgaacatgcagccccgatcattgttgaaggtgcacaaaaactaaaatggcaaggcaactggcaaaacaatcaaacagcattaataacattatcagaagctattcaagaagggcttagcaatcctcaaaattattgttatttagatataaccgcaaaaattaaaaatgcatttagccaagaggttcaccctagtcaaaagtttgtagacaatgttgaacaaggcatgtcatctaaacaacttgcatacactcaagtcggcgataaaaaagcagccagtttaaactcacaaaaagtaggggctgcgattcaaactattgatgattggtatgagggaggttacaaacctttacgcactcacgagtatggtgcagataagcaaatattagttgcacatagaacgcctaagagccattcagacttttattcattacttccgcgcattgccttgcatattaagcacatggaaaagcatggtttagagcaaagtgaagaatcaaacgcagttcactttattgcagcagtgttgatcaaaggcggcttgttccaaaggagtaaggcatgaagcgctattattttactattacttatttacctaaaaattgtgatgtaagcctccttgcagggcgttgtatcggcatattgcatgggtttatgagttcgcgtgaaattagtaatataggtgtgtgttttcctaaatggaatgagcaagagataggtaatgaattggcgtttgtatcgacagataaaaagcaattaaccaatctatctcagcaaagctattttgagatgatggctcaggataaattatttggcttatcaaaaatactcgaagtaccaacaaaccaaaatgaggttatgtttattcgcaaccaatcagtagctaaggcttttgttggcgaaaagcaaagacgtttaaaacgcgctaaaaaacgagctgaagccagaggtgaagtttataatcctgaatatcaatttgaggcaaaagacataggccattttcattcaatacctgtatcaagcaaagccaacggccaaagttatgttctgcatatacaaaaaattgaaaatactaatgcgacagaaaatcaatttaataattatggctttgctacaaatcaaacatttcaaggtacggttccttctttgaatacccaataacctttaataaggagatatagcatgtacagaagaaaactcaaacactcccgtgttaaaaaccttcataaatttgctagtcaaaaaaataaatctacctgtttagttgaatcctctttagagtttgatgcctgttttcattttgaattttcaccatcaatagccgcatttgaggcacaaccactaggttatgaatatgagtttgataaccgtatttgccgttacacacctgactttttacttacccacacagacggcacgcaaaaatttatagaagtaaaaccgcaaagcaaaattgctgacgaggactttcgtgcacgttttattgaaaagcaaaccatcgctaaacaagatggacgcgacttaatactggttactgataaacaaatccgtgtatacccaacactcaataacttaaaacttttacatcgctattctggttttcagtctttaacagagctgcaagcatcggtgctcgagcttgttaagcaatacggctctattaaagtgggccagttagttaactttttaaaagtaactgccggtgagctacttgctactgtgctacgcttattatcactagggcagttatttgccgacttaactacaaatgaaatatcaatagaaacagcaatttggtctaacaatgtttaatgacggtttgtttgatgatgagtttaaccagccattaccaaaagtagaaaccaaactacctcaaaattacgccaaagatttacaagcccttcctgaaaaaattaaaaatacaacatttgctaaacttaaatatattcaatggcttgaggctaatattcaaggtggctggacacaaaaaaaccttgagcctttattgaaagtaatgcctgaagttgagggtgaaaaaaagcctagctggagaacagctgcacgatggtatagcgcttatacaaatgcagataaaaatatcatggcgctaataccaagccatcaaaaaaagggtaacagggagcgcgatacagccaccgataagttttttgaaaaagcacttgagcgttacttagtaaaagaaaagccatcagtggcttctgcttacaagtattacgcagacttagttatcattgaaaacgacagcgttgtgggcagtgttttaaagcctttaacatacaaagcgtttaaaaatagaatcgataatttaccgcaatacgacgtgatggtttctcgctatggtaagcgtcttgctgatattgcttttaataaagtagaagggcatacacggcctacccgagtactcgaaaaagttgaaattgaccatacaccgcttgatcttattttattagatgatgagctacatatcccgcttggtaggccaacacttaccatgttagtcgatgtgtatagccattgtattgttggcttctactttagcttcagcgagcctagctatgatgcagtaaggcgagcaatgctaaatgcaatgaaacctaaaagtgatgtggcaaaactatacccagatacgataaatgagtggaaatgtgctggcaaaattgaaactctcgttgttgataatggcgctgaattttggagtaacagccttgaacttgcttgtgaagaaattggtattaatactcaatataaccctgttgcaaagccgtggttaaaaccctttgtagaacgtatgtttggcacaattaacactgaattattagaccctgttcctggtaaaaccttttctaacattttacaaaagcatgaatacaatcccaaaaaagatgcaatcatgcgctttacaacctttatgcagctattccataaatgggtagtagacgtttaccatcaagatgccgatagccgctttaagtacatacctagccaactatgggagcaaggctttaatacgttaccgccaacagtgctgagtaatgctgatcttcaacaattagatgttgtgctcagtatttcaaaccatagggtgcttcgtaaaggtggaatacggctagaaaatttaagctacgacagtactgaactagccaactatagaaaacagtttagccataaagtatctcaagaagttttaattaaattaaaccccgatgatatttcttatatatatgtttacctcgataagctagagcattacataaaagtgccatgcatagatccaaacggttacacccaaaatttaagtttgaatcagcataaaataaatatacgtattcatcgcgattttatttccggatctatcgataatgtaggcttagcaaaagcgcgtatgtttattcataataaaattcaaaacgagtttgaagagttaaaaaatgcaccaaaacactcaaaagtaaaagggggtaaagcattagctaagcatcaaaatgtaagtagtgactcacaaaaatcaatagctcagagcgagccattagaacccaaaaaggttacacctaaagagcaaccaacagatagctgggatgactttatttcagacctagatggattttaattatgctgaccgataaacaaaaagcaaaacttaatgaatttcgcgatgtatttattgaatacccaataataactactgtatttaacgactttgacagattaagacttggtaaaggattagcgggcgaaaagccctgcatgctgttaaatggcgatacaggcacaggtaaaacagcactaataaaacagtataaagaacgccatttaccgcaatttattaatggagtgatgaaccaccctgtattagtaagccgcatacctagtaacccgacactagaatctactttagccgagcttcttaaagacttagggcaagtaggtagtacagagcgcaagctgagaataaacggtacgcggttaacgacatcattaataaaatgcctaaaaacgtgtggcacagagcttataattattgatgagtttcaagagctgattgagcacaaccaaggtaaaaagcgccgcgagattgctaatcgattaaaatacattaacgatgaagcgggtgtatcgattgtattggtgggtatgccgtgggcagaaaaaatagcagacgaaccccagtggtcatcgcgtttattagtaaggcggcagctgccttattttaaattatcagaaaacccaaagcattttgtacagttaataattggcctagctaaccgtatgccattcaccgaaaagccaaaattaagtgagcaagcaacagtatttgctttgttctcattgtcaaaaggctgttttagaactcttaaatactttttagatgatgccgtactttatgcattaatggataacgcgaaaaccctcacaaccaagcatctagttaaagcatttggagtactgtttcctgatgtaccaaacctatttaccttgcccgttgcagaaattacagcaagtgaagttgagcgctattcactttataaacttgaaagcgcccaagatgaagatccgtttatagcgactaagtttactgaccaaatgccgattagtcagttgttgaggaagtaacctaggctgctgccaccgctgagcaataactagcataaccccttggggcctctaaacgggtcttgaggggttttttgctgaaacctcaggcatttgagaagcacacggtcacactgcttccggtagtcaataaacgaggaagcggaagagcactgccacccaaattcctcatttggtgttgtttgaagtataagttgacatatttgtactaaaagatggcataaattggaagtataaggtggcatagtctagtatttaaccaaatggttagatggttgactcacatgtacagaagaaaactcaaacactcccgtgttaaaaaccttcataaatttgctagtcaaaaaaataaatctacctgtttagttgaatcctctttagagtttgatgcctgttttcattttgaattttcaccatcaatagccgattagacggacgcaatcttgggatccgagccccaactggggtaacctttgagttctctcagttgggggagcacgtgttgacaattaatcatcggcatagtatatcggcatagtataatacgacaaggtgaggaactaaaccatgtcacatctcgcagaactggttgccagtgcgaaggcggccattagccaggcgtcagatgttgccgcgttagataatgtgcgcgtcgaatatttgggtaaaaaagggcacttaacccttcagatgacgaccctgcgtgagctgccgccagaagagcgtccggcagctggtgcggttatcaacgaagcgaaagagcaggttcagcaggcgctgaatgcgcgtaaagcggaactggaaagcgctgcactgaatgcgcgtctggcggcggaaacgattgatgtctctctgccaggtcgtcgcattgaaaacggcggtctgcatccggttacccgtaccatcgaccgtatcgaaagtttcttcggtgagcttggctttaccgtggcaaccgggccggaaatcgaagacgattatcataacttcgatgctctgaacattcctggtcaccacccggcgcgcgctgaccacgacactttctggtttgacactacccgcctgctgcgtacccagacctctggcgtacagatccgcaccatgaaagcccagcagccaccgattcgtatcatcgcgcctggccgtgtttatcgtaacgactacgaccagactcacacgccgatgttccatcagatggaaggtctgattgttgataccaacatcagctttaccaacctgaaaggcacgctgcacgacttcctgcgtaacttctttgaggaagatttgcagattcgcttccgtccttcctacttcccgtttgccgaaccttctgcagaagtggacgtcatgggtaaaaacggtaaatggctggaagtgctgggctgcgggatggtgcatccgaacgtgttgcgtaacgttggcatcgacccggaagtttactctggtttcggcttcgggatggggatggagcgtctgactatgttgcgttacggcgtcaccgacctgcgttcattcttcgaaaacgatctgcgtttcctcaaacagtttaaataaggaggacaatcatgattgaacaagatggattgcacgcaggttctccggccgcttgggtggagaggctattcggctatgactgggcacaacagacaatcggctgctctgatgccgccgtgttccggctgtcagcgcaggggcgcccggttctttttgtcaagaccgacctgtccggtgccctgaatgaactgcaggacgaggcagcgcggctatcgtggctggccacgacgggcgttccttgcgcagctgtgctcgacgttgtcactgaagcgggaagggactggctgctattgggcgaagtgccggggcaggatctcctgtcatctcaccttgctcctgccgagaaagtatccatcatggctgatgcaatgcggcggctgcatacgcttgatccggctacctgcccattcgaccaccaagcgaaacatcgcatcgagcgagcacgtactcggatggaagccggtcttgtcgatcaggatgatctggacgaagagcatcaggggctcgcgccagccgaactgttcgccaggctcaaggcgcgcatgcccgacggcgaggatctcgtcgtgacccatggcgatgcctgcttgccgaatatcatggtggaaaatggccgcttttctggattcatcgactgtggccggctgggtgtggcggaccgctatcaggacatagcgttggctacccgtgatattgctgaagagcttggcggcgaatgggctgaccgcttcctcgtgctttacggtatcgccgctcccgattcgcagcgcatcgccttctatcgccttcttgacgagttcttctgacctaggctcgagtaatggtttcttagacgtcttgacagctagctcagtcctaggtataatgctagcctgtcaccggatgtgctttccggtctgatgagtccgtgaggacgaaacagcctctacaaataattttgtttaatactagagaaagaggggaaatactagatggtgtcgaaaggtgaggagcttttcacgggggtggttccaatcttagtcgagcttgatggtgacgtgaatggccataagtttagcgtgcgcggcgagggtgagggcgatgcgacgaacggtaaacttactttaaagtttatttgtactacaggcaaattaccggtcccgtggccgaccctggtcactacgcttgggtatggggtagcatgttttgcccgttaccctgaccacatgaaacagcacgatttctttaaatctgccatgcccgaagggtatgttcaggagcgcactatcagttttaaagacgacggaacgtacaaaactcgtgctgaagtaaagttcgaaggtgatacccttgtgaaccgtatcgtccttaaaggcatcgacttcaaagaggacggtaacattttaggccacaaattagagtacaacttcaattcacataaggtttatatcacagcagataagcaaaaaaatggcatcaaggcaaattttaagacccgccacaacgtagaagatggtggagtccagttggcggaccactaccagcaaaatacaccgattggcgatggtccggttttgcttcccgacaatcactatcttagccaccagagtaaactgagtaaggacccaaatgaaaagcgcgaccacatggtattgaaagagcgcgttacagcagctggaattacacacgatatggacgaactttataagtaatagggataacagggtaatcgcaaaaaaccccgcttcggcggggttttttcgcgtttaaacgtgccagggcgtgcccttgggctccccgggcgcgttttttacgcgttctagagtccttactgcagtagttttgctgaaatactcgattcacaaaaatatcaacttatggttgttttgtgagatatcaatatatggttgttttgtggttaagttgctgattataaataattattaaatatcactttatggttgcatcaacaggtaccgagctctcatctgttacgctcggcgtgtagccggccagcctcgcagagcaggattcccgttgagcaccgccaggtgcgaataagggacagtgaagaaggaacacccgctcgcgggtgggcctacttcacctatcctgcccggctgatcgccgttggatacaccaaggaaagtctacacgaaccctttggcaaaatcctgtatatcgtgcgaaaaaggatggatataccgaaaaaatcgctataatgaccccgaagcagggttatgcagcggaaaagcgcttatcagcggtaccggtagctcggctgtgaatgaaatggacttaccaattaaagtaaaaggtgatgatttattcatcaaagtttttgtgccagtgtaaaccattttccaaactgtttaagagtgatttacaacgcgtagcatgtttactttgcgttttataaagctgtatttggtagctttatgccatctattgcttcaatactatgccaatatacacttcacttaccacgctgtaagttaataaaaccgagtttggttatgtcaacttatacttcaaacaacatttgggtgaaaatacattcctttttgacgtcaggtggcacttttcccggtaaaccagcaatagacataagcggctatttaacgaccctgccctgaaccgacgaccgggtcatcgtggccggatcttgcggcccctcggcttgaacgaattgttagacattatttgccgactaccttggtgatctcgcctttcacgtagtggacaaattcttccaactgatctgcgcgcgaggccaagcgatcttcttcttgtccaagataagcctgtctagcttcaagtatgacgggctgatactgggccggcaggcgctccattgcccagtcggcagcgacatccttcggcgcgattttgccggttactgcgctgtaccaaatgcgggacaacgtaagcactacatttcgctcatcgccagcccagtcgggcggcgagttccatagcgttaaggtttcatttagcgcctcaaatagatcctgttcaggaaccggatcaaagagttcctccgccgctggacctaccaaggcaacgctatgttctcttgcttttgtcagcaagatagccagatcaatgtcgatcgtggctggctcgaagatacctgcaagaatgtcattgcgctgccattctccaaattgcagttcgcgcttagctggataacgccacggaatgatgtcgtcgtgcacaacaatggtgacttctacagcgcggagaatctcgctctctccaggggaagccgaagtttccaaaaggtcgttgatcaaagctcgccgcgttgtttcatcaagccttacggtcaccgtaaccagcaaatcaatatcactgtgtggcttcaggccgccatccactgcggagccgtacaaatgtacggccagcaacgtcggttcgagatggcgctcgatgacgccaactacctctgatagttgagtcgatacttcggcgatcaccgcttccctcat

SEQ ID NO: 49 - DNA, 15655 bp, synthetic construct
  source 1..15655: mol_type = other DNA
gcgctgcggacacatacaaagttacccacagattccgtggataagcaggggactaacatgtgaggcaaaacagcagggccgcgccggtggcgtttttccataggctccgccctcctgccagagttcacataaacagacgcttttccggtgcatctgtgggagccgtgaggctcaaccatgaatctgacagtacgggcgaaacccgacaggacttaaagatccccaccgtttccggcgggtcgctccctcttgcgctctcctgttccgaccctgccgtttaccggatacctgttccgcctttctcccttacgggaagtgtggcgctttctcatagctcacacactggtatctcggctcggtgtaggtcgttcgctccaagctgggctgtaagcaagaactccccgttcagcccgactgctgcgccttatccggtaactgttcacttgagtccaacccggaaaagcacggtaaaacgccactggcagcagccattggtaactgggagttcgcagaggatttgtttagctaaacacgcggttgctcttgaagtgtgcgccaaagtccggctacactggaaggacagatttggttgctgtgctctgcgaaagccagttaccacggttaagcagttccccaactgacttaaccttcgatcaaaccacctccccaggtggttttttcgtttacagggcaaaagattacgcgcagaaaaaaaggatctcaagaagatcctttgatcttttctactgaaccgctctagatcaagccacttcctttttgcattgacgcagggtgtcggaaggcaactcgccgaacgcgctcctatagttttcagcgaagcgtcccaaatgtaagaagccgtagtctagggctatctcagttatactacgcacattggcactgggatcgttcaagcaggcgcggatgctttcgagcttgcggttgcggatgtagttcttcggcgtggtgccggcgtgcttctcgaacaaattgtagagcgagcgtggactcatcatcgccagctccgctaaccgctcaaggctgatattccgtttgagattctcctcaatgaattgaacgactcgctcgaaagacgggttacctttgctgaaaatttcacggctgacattgctgcccagcatttcgagcagcttggaagcgatgatccccgcatagtgctcttggacccgaggcatcgactttgtatgttccgcttcgtcacaaactaacccgagtagattgataaagccatcgagttgctggagattgtgtcgcgcggcgaaacggataccctccctcggcttgtgccaattgttgtcactgcacgcccgatcaaggaccactgagggcaatttaacgataaatttctcgcaatcttctgaataggtcaggtcggcttggtcatccggattgagcagcaatagttcgcccggcgcaaaatagtgctcctggccatggccacgccacaggcaatggcctttgagtattatttgcagatgataacatgtttctaatccaggcgagattaccctcacgctaccgccgtagctgattcgacacagatcgaggcatccgaagattctgtggtgcagcctgcctgccgggcgcccgcccttgggcaggcgaatagagtgcgtaccgacatactggttaacataatcggagactgcatagggctcggcgtggacgaagatctgacttttctcgttcaataagcaaaaatccatagttcacggttctcttattttaatgtgggctgcttggtgtgatgtagaaaggcgccaagtcgatgaaaatgcatctcgacgtgatgcgtatacgggttacccccattgccacgttgcgccatcctttttgcaatcagtgaccacttttccaagcaaaaataacgccaagcagaacgaagacgttctttttaagaagcgagaacaccagaagttcgtgctgtcggggcatggggcgacgaattggcggataaaggggatctagtccagccttgcaagaagcggatacaggagtgcaaaaaatggctatctctagtaaggcctaccccttaggctttatgcaagtcgacgtgacctgccgtataggcagctgaaaataacaagaactaccccaacgaggaacggatcaagtgacctgccgtataggcagctgaaaattagcgaattccgagcgaaggagatatacatatggcttttctattttctcccaaggctcgggcattttctgacgaatcgctggaaagttacttgttacgggtcgtttcagagaatttttttgactcgtatgaagggctcagcttagctattcgcgaagagctgcatgagcttgattttgaggcgcatggtgcattcccagtagatttaaagaggctcaatgtttaccacgccaaacataatagccattttaggatgcgggctttaggactactcgaaacactactagatttacctcgatacgagctacaaaagttggctttgctaaagtcagatattaaatttaactcctccgtcgctttatataacaatggcgtagacattcccctgaggtttattcgtcaccacgccgaggaagctgttgattcgattccggtatgctcacaatgtcttgcagaagaagcctatataaaacaaagttggcatataaagtgggtaaatgcatgcactaaacatcagtgtgctttgctacataactgcccagaatgctacgctccaattaactatatcgagaatgagtcaattactcattgttcatgcggttttgagctgtcttgcgctagtacctcgcctgtaaatacgttaagtattgaacatttaaataaattactggataaaggtgagcgcaacgatagtaacccgctatttaacaatatgactcttacagaacgttttgctgcgcttctttggtatcaggagcggtattctcaaacagataacttttgtttaaatgatgctgtgaactattttagtaaatggccagcagtttttaatacagagcttgatgaactaagtaaaaatgcagaaatgaagttaatagatctgtttaataaaactgagtttaagtttatttttggggatgctattttagcttgccccagtactcaaaagcagagtgaatctcactttatttatagggctctattagattatttagttactttagttgagagtaaccctaaaactaaaaagcccaacgcagccgacttattagtaagtgtattggaggctgcaactttattaggtacttcagtagagcaggtttataggttgtaccaaaatggtattttgcaaacggcatttcgtcataaaatgaaccagcggatcaacccttataagggcgcgttttttttaagacatgttatagagtacaaaaccagttttggaaatgacaaagctagaatgtatttgtcggcatggtgagtatatgcatcttaaggaactgctagagattacagacaccactgagcgggataggtcattacgtcgtgcttttagcccttatacggcaatgattgatataacaggcagcgaagccgttgccctgattattttgttaaacctgacttatcgaaaaaaccaagttgatgacttgctggataaaaagctcgcaaaacaggctttaaaaagtgaagaccatattaataaatgtattaaggaaatagcgtggtttcatactcataatttaaagtaccctgacattagagtcagtaagcaaaatttagccgtagagcctccaacactgcactcttatgttttgagtagtgctaactatcctaaagcctatggctggtcacataactcagctaaagttaattttgctaaattatttgttagttactttaaatggcaaaatcaagtcagttggctggcacaagtattagctacgaactcggataactggaaatccgcatttacctctcttgggttatccgttaaggcatttaaaagtttatgtgtaaccgttaaaaattcattgcctgaagaggccattcccgactctgttgaccgctactctcgccaaattagaatgccttatcatgatggttacttagctgttacgcctgtaattagccatgttgttcaatcaaaaattcaacaggcggcaattgataaacgagcccgatttagcaatgtagagtttacgcgtcctgctgctgtcagtatgttagctgcttccttaggtggtgttattaatgtgcttaattaccctccttatatacgaagtaaatatcatggtttaagtaactcacgagcatttaaattaaataatgggcaaacagtatttaacgttgaggcactattaaagccggaattaattaaagccttagaaggtattatatttagtaataatgcgctggctcttaaacagcgtagacaacaaaaagtaaaaaatattaaagagctgagaaacacgcttttagaatggttttcacctgtatttgaatggcgcttggacgctattgagaatgggtatgacttagaacagcttgagagtgcttcagagcgactagagtataaaatactatcgctacccgacaatgaactcccttcgctaacgattcctttatttaggttactaaatgaaatgcttggcggtgtgagcatgacacaaaggtatgcttttcatcctaaattaatgagccctttaaaagcagctttacaatggttgcttgttaatcttacagatcaaaaacatgtactgattgaagaagatgatgaacattatcgctatcttcatttaagcggtatacgtgtgtttgatgcgcaagcattatcaaacccttactgctcaggtattccatctttaaccgctgtttggggtatgattcacagctaccaaagaaaacttaatgaggcgctaggaacaaatgtacggttcacatccttttcttggtttattaggaattattctgctgtagcaggaaaaaaacttcctgaactgagccttcaaggcgctcagcaaagtaggctcaagcggccaggaattatcgatggcaaatactgtgatttggtatttgatttaataatacacattgatggttatgaagatgacttacaggcagtagatagtaagcctgacattttgaaagcgcattttccatctaactttgcaggtggtgttatgcatcagcctgagcttaactcaaatataaattggtgctgtttatatagtaatgaaaatcagttatttgaaaagttaaggcgactccctttatctggttgttgggttatgccaactgagcacaaaatacaggatttagatgagctactcttattattaaatagtgactctaaactaagcccatctatgatgggatatatgttactcaccgaaccgatggctagagttggatcacttgaaagactgcattgttatgctgaaccagcaataggagtggtgaaatacgaagcggccactagtgtaaggctaaaaggtattggtaactattttaatagcgctttttggatgctagatgcacaagaaaagtttatgctaatgaaaaaagtttaaccggaaaatacttaatggagctctgtaatatattaaaatatgatcgctcgctttaccctggtaaagctgtgtttttttataaaacggctgactctgattttgttccactagaggctgatattaataaaattcgaggccctaaatctggttttactgaagcattcaccccacagttttccccaaaaaacatctcacctcaggacttaacacataataatatattaactctcgaagagtgttatgtacctccaaatgtggagcatatattttgtcggttttctttgagagtacaggctaactcgttggtcccttcaggctgtagtgatccagaggttttttctttattaaaagagttggcagaaacatttaaagaatgcggtggttataaagaactagcagtaagatattgtcgaaatattttgataggtacatggctttggcgtaatcaaaacaccggcaacactcaaattgaaattaaaaccagcaaagggagttgttatttaatcgataacactcgtaagttagcttgggaaagcaaatgggcttctgatgatctaaaagtattggaagagcttagtaatgaaattgagagcgcattaactgatcccaatgtgttttggagtgctgatataaccgcgaaaatagaagcctcattttgccaagagatttacccaagccaaatccttaacgacaaggttaagcaaggagaggcctcaaaacagtttgtaaaagctaagtgtgcagatggccgttacgctgtaagttttaattcagtaaaaataggagcagcccttcagtcaatagatgattggtgggatgaggatgcaagtaaaagattacgagtgcatgagtttggtgctgataaagaaataggggttgcccgacgtcctcctgattctgaacagaatttttattctattttcaaaaatacggaatggtatttgtcagcccttaaaaattgcattactaataaaaatgaaaaaatagacccagctatttattacttattctctgtattgattaagggcggaatgttccagaaaaaagcagaggctaaaaaggcgtaattatgcaaaggtattacttcacagtccactttttaccaaaacaagctaatctagcgctgcttactggccgttgtatttctattatgcatgggtttattttgaagcataatattgaaggaatgggggttacgtttcctgcatggtcggactcatcaattggtaatgaaattgcttttgtttacacggacaaggagattttaaatacccttaaagatcaggcatattttgtggacatgcaagattgtggcttttttaaagtaagccaagttttagctgtacctgacagctgcgaagaagtacgttttatacgtaatcaggcggtagcaaaaattttcacaggtgaaagtagaagaagattaaagcgcctgcaaaaaagagcgttagcaagaggtgaagattttaatcctaaaaagatcgaagctccccgagagattgatattttccatagagtggctatgactagtaagagttcacaagaggattatattctgcatattcaaaagcaagatgttgactgccaagctgagccatactttagtaattatgggcttgcctcaaatgaaaagtttaaaggcacggttccggatttatcaccctcaatagatagaaattaacctttaataaggagatatagcatgtatatacgcaacttgagaaagccatctccaaataaaaatgtatttaaatttgcgagcactaaagttagtagtgtagttatgtgtgagagttcattagagtttgatgcatgttttcatcatgaatataacgatttgatagagagttttgggagtcagcctgaaggctttaaatatgagtttatgggtaaaagtttaccttacacaccagatgcactgatttcatatacagataaaacccaaaaataccacgaatataagccctattctaaaattgcttctccactatttagagctgaatttgctgccaaaagagctgcatcattaaaattggggattgatcttgttttagtaactgataggcaaattagggtaaatccaatattaaacaacttaaagttattacaccgctactcaggtgtttatggtatcagcggcattcaaaaagagttgctcagttttattcataaatcaggggtaatcaagctaaatgatataagctctcaggttgggataccaattggtgaaacacgatcttttttatttgggctcatgcataaagggttggttaaggctgatctagggtgtgatgatttaactaataatccaacattatgggctacaccatgactgacttttttaatgaatttgatgaaagcctggtaccattaaagccacaaacgcccacacaatacgtcaaattagatgatgccaacttaatccagcgtgatttggataccttttcagatacctttaaaaaccaagcactacaaaggtataagctaattagcactatagataaaaaactttcacgcggctggacccaacgaaatttagatcctattttagatgagctttttaaaggaggtgacgtagttcggccaaattggcgaactgttgctcgttggcgcaaaaaatatatcgaaagcaacggtgatatagcctcccttgctgataaaaaccacaaaatgggaaacagaactaaccgtataaaaggggatgataaattttttgataaagcattagaacgatttttagatgctaaaagacctactatagcaactgcatatcagtactataaagaccttattgttattgaaaatgagagtattgtcgaaggcaagattccaataatatcctacaatgcgtttaataaaagaatcaaagcaatacccccatacgcggtcgcggtcgcaaggcatggtaaatttaaagcagaccaatggtttgcttactgcgctgcgcacgtacccccgacaagaatattagagcgtgtagagattgatcatacaccacttgatttaatcctacttgatgatgagttacttattcccataggaagaccttacctaacattacttattgatgtatttagtggctgtgttcttggttttcatcttagttataaatccccttcctacgtatctgctgctaaggctattactcatgcgattaaaccaaagtctcttgatgctctgaatatagaactacaaaatgattggccttgctttggtaaatttgaaaatttagttgtagataatggtgctgagttttggtctaaaaacttagagcatgcttgtcagtcagcaggaataaatatccaatataaccctgtgcgcaagccttggctaaaaccctttatagagcgtttttttggggtgatgaatgaatatttcttacctgaattaccaggaaagacattttcaaatattttagaaaaagaagagtataaacctgagaaagatgcaattatgcgcttctcaacttttgttgaagaatttcaccgctggatcgcggatgtgtatcatcaagacagtaattcacgtgaaactcgaatcccaattaaacgttggcaacaagggtttgatgcatatcccccattgaccatgaatgaagaggaggaaacgcgtttttcaatgttaatgcgcatctcagactcaagaacgttaacgagaaatgggtttaaatatcaagagttaatgtatgactcaacagctttggctgattatcgtaaacattatccgcaaacaaaagaaactgtaaaaaaactgattaaagtagaccctgatgacatctcaaaaatttatgtttatttagaagagttagaaagttatctcgaagtaccgtgtacagatcctaccggctatacggatggtttaagtatctatgagcataaaacaataaaaaaaattaacagggaagtcatacgggaatctaaagatagtttgggcttagcgaaagcacgcatggctattcatgagcgagtaaagcaagagcaagaagttttcattgaatcaaaaactaaagctaagataacagctgttaaaaagcaagctcaaatagctgatgtaagtaatacaggaacgagcactattaaggtttctgaagaaagtgcagcccctgtgcaaaaacatataagtaacgataattctgacgactgggatgatgacttagaggcatttgaatgaatgccttaacagagatacagatagagaagcttcggaactttagcgattgcatcgttatgcacccgcaaattaaaacaatttttaatgactttgatgaattaagattaaaccgtaaatttcagtcagaccaacagtgtatgctattaattggtgatacaggtgttggaaaaagtcataccattaatcactacaaaaaaagagttctagctacacagaattatagtcgaaacactatgccagtcttagtaagtcgtatatctagggggaaaggcttagatgctactttagtccaaatgctggcagatctggagctatttggaagtagtcaaattaaaaagcgaggctacaaaacagaccttactaaaaagctcgtagagagcttaattaaagctcaagtagagctactcatcattaatgagtttcaggagttaatagagtttaaaagcgtacaagaacgacaacaaattgcaaatgggttaaagtttattagtgaagaggccaaagtgccaatagtactggttggtatgccttgggctgcaaaaatagctgaagaacctcaatgggcttctcgcttagttagaaaaagaaaacttgaatactttagcctaaaaaatgacagcaagtactttcgccaatatttgatggggttagctaagaaaatgccatttgatgtacctcctaagctcgaaagtaaaaataccacaatagcgttgtttgctgcatgtcgaggtgagaatcgagcccttaaacatctactgttggaggctttaaaattagcactaagttgtaatgagtatcttgaaaataaacattttattactgcttatgacaagtttgatttttttaatgataaggaaaaactaaaatcaaaaaatccttttaaacaagacattaaagatattgaaatttatgaggtaatcaaaaactcatcttataacccaaatgcattagacccagaagatatgctcacagatcgagtgtttgcaatagtaaagtaacctaggctgctgccaccgctgagcaataactagcataaccccttggggcctctaaacgggtcttgaggggttttttgctgaaacctcaggcatttgagaagcacacggtcacactgcttccggtagtcaataaacgaggaagcggaagagcgtgttgatcggctttaaggatctagtgtcgctgcaaccatagtttgacataatgcaaccataccttgacataattaaagtcatactctgacataaagccccttattaaaaatgatgctaaaaataaattccattataatcaattatttaagaattaattaaaccatagtgtgacatagtggctttttatttgtatagtatgtgtactcaaataataaaaatttacttatgtatatacgcaacttaagaaagccatctccaaataaaaatgtatttaagaggcagtccctcttagaggatcctactaggagcacgtgttgacaattaatcatcggcatagtatatcggcatagtataatacgacaaggtgaggaactaaaccatgaacatcaaaaagtttgcaaaacaagcaacagtattaacctttactaccgcactgctggcaggaggcgcaactcaagcgtttgcgaaagaaacgaaccaaaagccatataaggaaacatacggcatttcccatattacacgccatgatatgctgcaaatccctgaacagcaaaaaaatgaaaaatataaagttcctgagttcgattcgtccacaattaaaaatatctcttctgcaaaaggcctggacgtttgggacagctggccattacaaaacactgacggcactgtcgcaaactatcacggctaccacatcgtctttgcattagccggagatcctaaaaatgcggatgacacatcgatttacatgttctatcaaaaagtcggcgaaacttctattgacagctggaaaaacgctggccgcgtctttaaagacagcgacaaattcgatgcaaatgattctatcctaaaagaccaaacacaagaatggtcaggttcagccacatttacatctgacggaaaaatccgtttattctacactgatttctccggtaaacattacggcaaacaaacactgacaactgcacaagttaacgtatcagcatcagacagctctttgaacatcaacggtgtagaggattataaatcaatctttgacggtgacggaaaaacgtatcaaaatgtacagcagttcatcgatgaaggcaactacagctcaggcgacaaccatacgctgagagatcctcactacgtagaagataaaggccacaaatacttagtatttgaagcaaacactggaactgaagatggctaccaaggcgaagaatctttatttaacaaagcatactatggcaaaagcacatcattcttccgtcaagaaagtcaaaaacttctgcaaagcgataaaaaacgcacggctgagttagcaaacggcgctctcggtatgattgagctaaacgatgattacacactgaaaaaagtgatgaaaccgctgattgcatctaacacagtaacagatgaaattgaacgcgcgaacgtctttaaaatgaacggcaaatggtacctgttcactgactcccgcggatcaaaaatgacgattgacggcattacgtctaacgatatttacatgcttggttatgtttctaattctttaactggcccatacaagccgctgaacaaaactggccttgtgttaaaaatggatcttgatcctaacgatgtaacctttacttactcacacttcgctgtacctcaagcgaaaggaaacaatgtcgtgattacaagctatatgacaaacagaggattctacgcagacaaacaatcaacgtttgcgcctagcttcctgctgaacatcaaaggcaagaaaacatctgttgtcaaagacagcatccttgaacaaggacaattaacagttaacaaataaggaggacaatcatgaaatctaacaatgcgctcatcgtcatcctcggcaccgtcaccctggatgctgtaggcataggcttggttatgccggtactgccgggcctcttgcgggatatcgtccattccgacagcatcgccagtcactatggcgtgctgctagcgctatatgcgttgatgcaatttctatgcgcacccgttctcggagcactgtccgaccgctttggccgccgcccagtcctgctcgcttcgctacttggagccactatcgactacgcgatcatggcgaccacacccgtcctgtggatcctctacgccggacgcatcgtggccggcatcaccggcgccacaggtgcggttgctggcgcctatatcgccgacatcaccgatggggaagatcgggctcgccacttcgggctcatgagcgcttgtttcggcgtgggtatggtggcaggccccgtggccgggggactgttgggcgccatctccttgcatgcaccattccttgcggcggcggtgctcaacggcctcaacctactactgggctgcttcctaatgcaggagtcgcataagggagagcgtcgaccgatgcccttgagagccttcaacccagtcagctccttccggtgggcgcggggcatgactatcgtcgccgcacttatgactgtcttctttatcatgcaactcgtaggacaggtgccggcagcgctctgggtcattttcggcgaggaccgctttcgctggagcgcgacgatgatcggcctgtcgcttgcggtattcggaatcttgcacgccctcgctcaagccttcgtcactggtcccgccaccaaacgtttcggcgagaagcaggccattatcgccggcatggcggccgacgcgctgggctacgtcttgctggcgttcgcgacgcgaggctggatggccttccccattatgattcttctcgcttccggcggcatcgggatgcccgcgttgcaggccatgctgtccaggcaggtagatgacgaccatcagggacagcttcaaggatcgctcgcggctcttaccagcctaacttcgatcactggaccgctgatcgtcacggcgatttatgccgcctcggcgagcacatggaacgggttggcatggattgtaggcgccgccctataccttgtctgcctccccgcgttgcgtcgcggtgcatggagccgggccacctcgacctgatgtccgatcatctgttacgccggcggtagccggccagcctcgcagagcaggattcccgttgagcaccgccaggtgcgaataagggacagtgaagaaggaacacccgctcgcgggtgggcctacttcacctatcctgcccggctgacgccgttggatacaccaaggaaagtctacacgaaccctttggcaaaatcctgtatatcgtgcgaaaaaggatggatataccgaaaaaatcgctataatgaccccgaagcagggttatgcagcggaaaagcgctctttgttgatacaaccataaaatgataattacacccataaattgataattatcacacccataaattgatattgcctcttcatggtctaaacttcagtaagtttacgacattttcctcgaggtcatttccggggatccgcgatcgcttctccttacgcatctgtgcggtatttcaggtaccctgcccaagtcttatgaatgccgtataggcagctgaagataaaaacaatcgattcgatgtttaagttaatgtaattctgccgaaaaggcagtgagtagtaattgaaaaaaccagtcttatatccgggctggtttttttgtttttagcgttataacttttatttcactatgtcactgtatggttgcattttatgtcagtgaatggttgcaggttttttgtaagttattgatatgcctatccagtgtatgtcacgctttgcttgcagcgacatctaggatcttagcgcgcttttatggacgtcaggtggcacttttcccggtaaaccagcaatagacataagcggctatttaacgaccctgccctgaaccgacgaccgggtcatcgtggccggatcttgcggcccctcggcttgaacgaattgttagacattatttgccgactaccttggtgatctcgcctttcacgtagtggacaaattcttccaactgatctgcgcgcgaggccaagcgatcttcttcttgtccaagataagcctgtctagcttcaagtatgacgggctgatactgggccggcaggcgctccattgcccagtcggcagcgacatccttcggcgcgattttgccggttactgcgctgtaccaaatgcgggacaacgtaagcactacatttcgctcatcgccagcccagtcgggcggcgagttccatagcgttaaggtttcatttagcgcctcaaatagatcctgttcaggaaccggatcaaagagttcctccgccgctggacctaccaaggcaacgctatgttctcttgcttttgtcagcaagatagccagatcaatgtcgatcgtggctggctcgaagatacctgcaagaatgtcattgcgctgccattctccaaattgcagttcgcgcttagctggataacgccacggaatgatgtcgtcgtgcacaacaatggtgacttctacagcgcggagaatctcgctctctccaggggaagccgaagtttccaaaaggtcgttgatcaaagctcgccgcgttgtttcatcaagccttacggtcaccgtaaccagcaaatcaatatcactgtgtggcttcaggccgccatccactgcggagccgtacaaatgtacggccagcaacgtcggttcgagatggcgctcgatgacgccaactacctctgatagttgagtcgatacttcggcgatcaccgcttccctcatactcttcctttttcaatattattgaagcatttatcagggttattgtctcatgagcggatacatatttgaatgtatttagaaaaataaacaaatagctagctcactcggtcgctacgctccgggcgtgagactgcggcgg

SEQ ID NO: 50 - DNA, 15683 bp, synthetic construct
  source 1..15683: mol_type = other DNA
actcttcctttttcaatattattgaagcatttatcagggttattgtctcatgagcggatacatatttgaatgtatttagaaaaataaacaaatagctagctcactcggtcgctacgctccgggcgtgagactgcggcgggcgctgcggacacatacaaagttacccacagattccgtggataagcaggggactaacatgtgaggcaaaacagcagggccgcgccggtggcgtttttccataggctccgccctcctgccagagttcacataaacagacgcttttccggtgcatctgtgggagccgtgaggctcaaccatgaatctgacagtacgggcgaaacccgacaggacttaaagatccccaccgtttccggcgggtcgctccctcttgcgctctcctgttccgaccctgccgtttaccggatacctgttccgcctttctcccttacgggaagtgtggcgctttctcatagctcacacactggtatctcggctcggtgtaggtcgttcgctccaagctgggctgtaagcaagaactccccgttcagcccgactgctgcgccttatccggtaactgttcacttgagtccaacccggaaaagcacggtaaaacgccactggcagcagccattggtaactgggagttcgcagaggatttgtttagctaaacacgcggttgctcttgaagtgtgcgccaaagtccggctacactggaaggacagatttggttgctgtgctctgcgaaagccagttaccacggttaagcagttccccaactgacttaaccttcgatcaaaccacctccccaggtggttttttcgtttacagggcaaaagattacgcgcagaaaaaaaggatctcaagaagatcctttgatcttttctactgaaccgctctagatcaagccacttcctttttgcattgacgcagggtgtcggaaggcaactcgccgaacgcgctcctatagttttcagcgaagcgtcccaaatgtaagaagccgtagtctagggctatctcagttatactacgcacattggcactgggatcgttcaagcaggcgcggatgctttcgagcttgcggttgcggatgtagttcttcggcgtggtgccggcgtgcttctcgaacaaattgtagagcgagcgtggactcatcatcgccagctccgctaaccgctcaaggctgatattccgtttgagattctcctcaatgaattgaacgactcgctcgaaagacgggttacctttgctgaaaatttcacggctgacattgctgcccagcatttcgagcagcttggaagcgatgatccccgcatagtgctcttggacccgaggcatcgactttgtatgttccgcttcgtcacaaactaacccgagtagattgataaagccatcgagttgctggagattgtgtcgcgcggcgaaacggataccctccctcggcttgtgccaattgttgtcactgcacgcccgatcaaggaccactgagggcaatttaacgataaatttctcgcaatcttctgaataggtcaggtcggcttggtcatccggattgagcagcaatagttcgcccggcgcaaaatagtgctcctggccatggccacgccacaggcaatggcctttgagtattatttgcagatgataacatgtttctaatccaggcgagattaccctcacgctaccgccgtagctgattcgacacagatcgaggcatccgaagattctgtggtgcagcctgcctgccgggcgcccgcccttgggcaggcgaatagagtgcgtaccgacatactggttaacataatcggagactgcatagggctcggcgtggacgaagatctgacttttctcgttcaataagcaaaaatccatagttcacggttctcttattttaatgtgggctgcttggtgtgatgtagaaaggcgccaagtcgatgaaaatgcatctcgacgtgatgcgtatacgggttacccccattgccacgttgcgccatcctttttgcaatcagtgaccacttttccaagcaaaaataacgccaagcagaacgaagacgttctttttaagaagcgagaacaccagaagttcgtgctgtcggggcatggggcgacgaattggcggataaaggggatctagtccagccttgcaagaagcggatacaggagtgcaaaaaatggctatctctagtaaggcctaccccttaggctttatgcaactagtgtgaactgccgagtaggtagctggaaattgggcctgaaaagaaagctcggcatgtacaaggtgaactgccgagtaggtagctggaaattagccaattggaattccgagcgaaggagatatacatatgcattttttagttcaaacaaaactttatcctgatgaggctcttgaaagctatttgctaaggcttgctagggataactcatacgatggctatagtgagcttgctgatattttatggcaatggcttgtagagcaagatcatgatcttgaaggtgcgttgccgttagagctgggtaaagttgatgtttatcatgctaggcaagcgagtagctttagaataagagcgctcaagttggtagctcaattagctgatgtaaacgctggtaatattcttgcgcttgcatggcggcgcagtaattttaaatttggcaacttagtagcagtaagccgtaatgagcagacaattcctcttgagttacttcgcactgataatatacctgtttgcattgaatgcttgtttgaatcttcttacgttccttttcattggcatttaaagccctataagacgtgccataagcataaatcacaattaactacacattgtaaggaatgccataacttaattgattacagagcttctgaggagtttttagagtgcagttgtggttgtaaactaaccaatagtgaacagttaaacgatgcagactttaaaattgcatttgcgcttgcaagtagtaacagccataaaatagtggggttaatatcttggtttgcgaaggttaagcaacttgatgtaagcgatgctgactttaaccgtacttttgttgattactttagtacttggcctgaaagccttactactgaattagatttactcacaaacaatgcgcgcctcaagcaacttaacccttttaataaaactaagttcaactctgtttatggaaatgtgatccgtgatggtcaaatagctgcaacaagtaaccgtaaaaacaaagtacttgatgaactaattaaatattttgttgaattagttgatagtaatcctaaaactaaacatccaaatattgcagatttactgctttgtacttttgataccgcagtattattaaacaccaccacagagcaagtttataggcttcatcaagaaggctttttaaactgcgcttacccacaaaaaaagcacgaacagctcagagctgatagtcatgttttttatttacgccaagtgattgagctacagcaagcattcgcagctgaaacgcctcaaacaaaaaaacaatttatagcgccgtggtaacttatgaacttacaagatgcatttgcgattgaatcacttaaggaaaaaaccacagcacttagaaagttgtttactccatatatgtctcatgttgcggtagatggctttgaagaacaagcgctgactgtgctcattaacctagtttataaacgaagtgagattgatgatttaacaagtacaagaaccgctaaaagtgtattacgtgatgaagtgttactgagtaaatgtattaacgaagttaaatggtttcatactcataatttaaaatatcctgatatacgcgtaagccatcaacgtttaattagtaaggtagtaagtgaagatattgcgggtatttgtagccggtcattacctttaagttttggatggtcgcacaacagtgctgaaattaatcatgcaaagttatttttaacctcatttacttggcaaggtgaagtaacttgtttagcaaatttactaataaatgaggagcctgtttggattaatttaataaggacatacgggtttactaaaaaggcggttttaggcatcgcgggtaaaataaaacagcttttgccagtggcagaactcccattagaagtaagctctttttcaccacaattacaaatgccatttcagcaaagctaccttgcggttacgcctgtagtaagtcacgcaatgctggctaaaattcagcaattaacaacagatcgtaagttaaattttggtttagttgagcactcaagacctgccaatgttggcgatttagcaagctcagtaggtggtaatattagagtgctgcgttactttcctaaaacatattcaaaggctgttaactgctctgaagtattcaataatgatagtgagaaagcatttaaaattcgtgcgctattaaacagtcaatttcaacaggcgcttttggtattggtcggtattaaacagtttaatacgttaaggcaaaagcgattagcgcgagtagcggctattaggcaagtacgtgttagcttgcagttgtggctggataacattctggaagctaaaaataacgctcaagggcaagcctaccctgagtgggcaaagcattacttagatcagagtattactaactgcattagccaatttagtaacgtactaaatgagagccttggtaatttaagtaagctcaaacgctttgcgtatcaccctaatttaatgggggtgtttaaaacgcagttaaactatgtgtttactcactgtattcctgatgaagaaacattaaatgatgagcaaatagtgtatgtgcattgccaagatatgcgagtgtttgatgctgaggcaatggctaatccgtatattcaaggtatgccgtcacttacagctttaaatgggcttgctcataactttgagcgtaagctaaaaaattttatagacccttcaattaagtgtattggtagtgccattaacattgaaagttatcaactacatacaggtaaaccattacctgaaccaagtaagttaaaacaagttgctggccgtagtcatgtcataagatcaggaattatcgataaacctaaatgcgatataacactcgatttagtctttaggctttttgtaccaaacattaagctgttagataagttaaatagtcagcttgtgaaacccgcactaccatctatgtttgcaggcgggactatgcatccaccttcgttataccaaaatattgactggtgccatttacatactaaaccaagtgagctgtttaaaaatataaaggcaaaatcgttaaatggcagttggttgtacccttcaaaaaaagtagtcaaaagttttgaacagttgattgatgcgcttaacggtaactttaatttaagacctgctgccattggttttgctgcgcttgaagaacccataaagcgagatgtagccttacatgaataccattgttatgctgagcccgtaattgggcttttagagtgtgttagcaatacatcagttaagtacgcaggggctaagcagttcttccatgacgcattttgggttatggatgttcaaaaagagtctatgcttatgaaaaagtctaagtttgagtatgaataatgcaattacctcggcatttaagttacacgcgttcgctttcacccagtaaagcggtatttttttataaaacatcggagtctgattttgaaccgctgcaaatagagcaaaataagcttgttgggcaaaagtcagggtttggcgatgcgtatcaaaagcaaaatgtggctaaaaatttagcgccacaagatctagcgtttggaaacccacaaacgattgatgtgtgctacgtacctccagcagtaaatgagctattttgccgtttttcactcagggttgaggctaatagcaatgaaccacacgtttgtgatgaccctaaagttatttattggttaaaacggttttttgaaacctacaaaaaacacaatggtcttaatgaagttgcaactcgctatgctaaaaatatactgatggggaactggctttggcgtaaccgccaatcaccaaatgttgatattgaaatccttactgaacatgcagccccgatcattgttgaaggtgcacaaaaactaaaatggcaaggcaactggcaaaacaatcaaacagcattaataacattatcagaagctattcaagaagggcttagcaatcctcaaaattattgttatttagatataaccgcaaaaattaaaaatgcatttagccaagaggttcaccctagtcaaaagtttgtagacaatgttgaacaaggcatgtcatctaaacaacttgcatacactcaagtcggcgataaaaaagcagccagtttaaactcacaaaaagtaggggctgcgattcaaactattgatgattggtatgagggaggttacaaacctttacgcactcacgagtatggtgcagataagcaaatattagttgcacatagaacgcctaagagccattcagacttttattcattacttccgcgcattgccttgcatattaagcacatggaaaagcatggtttagagcaaagtgaagaatcaaacgcagttcactttattgcagcagtgttgatcaaaggcggcttgttccaaaggagtaaggcatgaagcgctattattttactattacttatttacctaaaaattgtgatgtaagcctccttgcagggcgttgtatcggcatattgcatgggtttatgagttcgcgtgaaattagtaatataggtgtgtgttttcctaaatggaatgagcaagagataggtaatgaattggcgtttgtatcgacagataaaaagcaattaaccaatctatctcagcaaagctattttgagatgatggctcaggataaattatttggcttatcaaaaatactcgaagtaccaacaaaccaaaatgaggttatgtttattcgcaaccaatcagtagctaaggcttttgttggcgaaaagcaaagacgtttaaaacgcgctaaaaaacgagctgaagccagaggtgaagtttataatcctgaatatcaatttgaggcaaaagacataggccattttcattcaatacctgtatcaagcaaagccaacggccaaagttatgttctgcatatacaaaaaattgaaaatactaatgcgacagaaaatcaatttaataattatggctttgctacaaatcaaacatttcaaggtacggttccttctttgaatacccaataacctttaataaggagatatagcatgtacagaagaaaactcaaacactcccgtgttaaaaaccttcataaatttgctagtcaaaaaaataaatctacctgtttagttgaatcctctttagagtttgatgcctgttttcattttgaattttcaccatcaatagccgcatttgaggcacaaccactaggttatgaatatgagtttgataaccgtatttgccgttacacacctgactttttacttacccacacagacggcacgcaaaaatttatagaagtaaaaccgcaaagcaaaattgctgacgaggactttcgtgcacgttttattgaaaagcaaaccatcgctaaacaagatggacgcgacttaatactggttactgataaacaaatccgtgtatacccaacactcaataacttaaaacttttacatcgctattctggttttcagtctttaacagagctgcaagcatcggtgctcgagcttgttaagcaatacggctctattaaagtgggccagttagttaactttttaaaagtaactgccggtgagctacttgctactgtgctacgcttattatcactagggcagttatttgccgacttaactacaaatgaaatatcaatagaaacagcaatttggtctaacaatgtttaatgacggtttgtttgatgatgagtttaaccagccattaccaaaagtagaaaccaaactacctcaaaattacgccaaagatttacaagcccttcctgaaaaaattaaaaatacaacatttgctaaacttaaatatattcaatggcttgaggctaatattcaaggtggctggacacaaaaaaaccttgagcctttattgaaagtaatgcctgaagttgagggtgaaaaaaagcctagctggagaacagctgcacgatggtatagcgcttatacaaatgcagataaaaatatcatggcgctaataccaagccatcaaaaaaagggtaacagggagcgcgatacagccaccgataagttttttgaaaaagcacttgagcgttacttagtaaaagaaaagccatcagtggcttctgcttacaagtattacgcagacttagttatcattgaaaacgacagcgttgtgggcagtgttttaaagcctttaacatacaaagcgtttaaaaatagaatcgataatttaccgcaatacgacgtgatggtttctcgctatggtaagcgtcttgctgatattgcttttaataaagtagaagggcatacacggcctacccgagtactcgaaaaagttgaaattgaccatacaccgcttgatcttattttattagatgatgagctacatatcccgcttggtaggccaacacttaccatgttagtcgatgtgtatagccattgtattgttggcttctactttagcttcagcgagcctagctatgatgcagtaaggcgagcaatgctaaatgcaatgaaacctaaaagtgatgtggcaaaactatacccagatacgataaatgagtggaaatgtgctggcaaaattgaaactctcgttgttgataatggcgctgaattttggagtaacagccttgaacttgcttgtgaagaaattggtattaatactcaatataaccctgttgcaaagccgtggttaaaaccctttgtagaacgtatgtttggcacaattaacactgaattattagaccctgttcctggtaaaaccttttctaacattttacaaaagcatgaatacaatcccaaaaaagatgcaatcatgcgctttacaacctttatgcagctattccataaatgggtagtagacgtttaccatcaagatgccgatagccgctttaagtacatacctagccaactatgggagcaaggctttaatacgttaccgccaacagtgctgagtaatgctgatcttcaacaattagatgttgtgctcagtatttcaaaccatagggtgcttcgtaaaggtggaatacggctagaaaatttaagctacgacagtactgaactagccaactatagaaaacagtttagccataaagtatctcaagaagttttaattaaattaaaccccgatgatatttcttatatatatgtttacctcgataagctagagcattacataaaagtgccatgcatagatccaaacggttacacccaaaatttaagtttgaatcagcataaaataaatatacgtattcatcgcgattttatttccggatctatcgataatgtaggcttagcaaaagcgcgtatgtttattcataataaaattcaaaacgagtttgaagagttaaaaaatgcaccaaaacactcaaaagtaaaagggggtaaagcattagctaagcatcaaaatgtaagtagtgactcacaaaaatcaatagctcagagcgagccattagaacccaaaaaggttacacctaaagagcaaccaacagatagctgggatgactttatttcagacctagatggattttaattatgctgaccgataaacaaaaagcaaaacttaatgaatttcgcgatgtatttattgaatacccaataataactactgtatttaacgactttgacagattaagacttggtaaaggattagcgggcgaaaagccctgcatgctgttaaatggcgatacaggcacaggtaaaacagcactaataaaacagtataaagaacgccatttaccgcaatttattaatggagtgatgaaccaccctgtattagtaagccgcatacctagtaacccgacactagaatctactttagccgagcttcttaaagacttagggcaagtaggtagtacagagcgcaagctgagaataaacggtacgcggttaacgacatcattaataaaatgcctaaaaacgtgtggcacagagcttataattattgatgagtttcaagagctgattgagcacaaccaaggtaaaaagcgccgcgagattgctaatcgattaaaatacattaacgatgaagcgggtgtatcgattgtattggtgggtatgccgtgggcagaaaaaatagcagacgaaccccagtggtcatcgcgtttattagtaaggcggcagctgccttattttaaattatcagaaaacccaaagcattttgtacagttaataattggcctagctaaccgtatgccattcaccgaaaagccaaaattaagtgagcaagcaacagtatttgctttgttctcattgtcaaaaggctgttttagaactcttaaatactttttagatgatgccgtactttatgcattaatggataacgcgaaaaccctcacaaccaagcatctagttaaagcatttggagtactgtttcctgatgtaccaaacctatttaccttgcccgttgcagaaattacagcaagtgaagttgagcgctattcactttataaacttgaaagcgcccaagatgaagatccgtttatagcgactaagtttactgaccaaatgccgattagtcagttgttgaggaagtaacctaggctgctgccaccgctgagcaataactagcataaccccttggggcctctaaacgggtcttgaggggttttttgctgaaacctcaggcatttgagaagcacacggtcacactgcttccggtagtcaataaacgaggaagcggaagagcactgccacccaaattcctcatttggtgttgtttgaagtataagttgacatatttgtactaaaagatggcataaattggaagtataaggtggcatagtctagtatttaaccaaatggttagatggttgactcacatgtacagaagaaaactcaaacactcccgtgttaaaaaccttcataaatttgctagtcaaaaaaataaatctacctgtttagttgaatcctctttagagtttgatgcctgttttcattttgaattttcaccatcaatagccgattagacggacgcaatcttgggatccgagccccaactggggtaacctttgagttctctcagttgggggagcacgtgttgacaattaatcatcggcatagtatatcggcatagtataatacgacaaggtgaggaactaaaccatgtcacatctcgcagaactggttgccagtgcgaaggcggccattagccaggcgtcagatgttgccgcgttagataatgtgcgcgtcgaatatttgggtaaaaaagggcacttaacccttcagatgacgaccctgcgtgagctgccgccagaagagcgtccggcagctggtgcggttatcaacgaagcgaaagagcaggttcagcaggcgctgaatgcgcgtaaagcggaactggaaagcgctgcactgaatgcgcgtctggcggcggaaacgattgatgtctctctgccaggtcgtcgcattgaaaacggcggtctgcatccggttacccgtaccatcgaccgtatcgaaagtttcttcggtgagcttggctttaccgtggcaaccgggccggaaatcgaagacgattatcataacttcgatgctctgaacattcctggtcaccacccggcgcgcgctgaccacgacactttctggtttgacactacccgcctgctgcgtacccagacctctggcgtacagatccgcaccatgaaagcccagcagccaccgattcgtatcatcgcgcctggccgtgtttatcgtaacgactacgaccagactcacacgccgatgttccatcagatggaaggtctgattgttgataccaacatcagctttaccaacctgaaaggcacgctgcacgacttcctgcgtaacttctttgaggaagatttgcagattcgcttccgtccttcctacttcccgtttgccgaaccttctgcagaagtggacgtcatgggtaaaaacggtaaatggctggaagtgctgggctgcgggatggtgcatccgaacgtgttgcgtaacgttggcatcgacccggaagtttactctggtttcggcttcgggatggggatggagcgtctgactatgttgcgttacggcgtcaccgacctgcgttcattcttcgaaaacgatctgcgtttcctcaaacagtttaaataaggaggacaatcatgattgaacaagatggattgcacgcaggttctccggccgcttgggtggagaggctattcggctatgactgggcacaacagacaatcggctgctctgatgccgccgtgttccggctgtcagcgcaggggcgcccggttctttttgtcaagaccgacctgtccggtgccctgaatgaactgcaggacgaggcagcgcggctatcgtggctggccacgacgggcgttccttgcgcagctgtgctcgacgttgtcactgaagcgggaagggactggctgctattgggcgaagtgccggggcaggatctcctgtcatctcaccttgctcctgccgagaaagtatccatcatggctgatgcaatgcggcggctgcatacgcttgatccggctacctgcccattcgaccaccaagcgaaacatcgcatcgagcgagcacgtactcggatggaagccggtcttgtcgatcaggatgatctggacgaagagcatcaggggctcgcgccagccgaactgttcgccaggctcaaggcgcgcatgcccgacggcgaggatctcgtcgtgacccatggcgatgcctgcttgccgaatatcatggtggaaaatggccgcttttctggattcatcgactgtggccggctgggtgtggcggaccgctatcaggacatagcgttggctacccgtgatattgctgaagagcttggcggcgaatgggctgaccgcttcctcgtgctttacggtatcgccgctcccgattcgcagcgcatcgccttctatcgccttcttgacgagttcttctgacctaggctcgagtaatggtttcttagacgtcttgacagctagctcagtcctaggtataatgctagcctgtcaccggatgtgctttccggtctgatgagtccgtgaggacgaaacagcctctacaaataattttgtttaatactagagaaagaggggaaatactagatggtgtcgaaaggtgaggagcttttcacgggggtggttccaatcttagtcgagcttgatggtgacgtgaatggccataagtttagcgtgcgcggcgagggtgagggcgatgcgacgaacggtaaacttactttaaagtttatttgtactacaggcaaattaccggtcccgtggccgaccctggtcactacgcttgggtatggggtagcatgttttgcccgttaccctgaccacatgaaacagcacgatttctttaaatctgccatgcccgaagggtatgttcaggagcgcactatcagttttaaagacgacggaacgtacaaaactcgtgctgaagtaaagttcgaaggtgatacccttgtgaaccgtatcgtccttaaaggcatcgacttcaaagaggacggtaacattttaggccacaaattagagtacaacttcaattcacataaggtttatatcacagcagataagcaaaaaaatggcatcaaggcaaattttaagacccgccacaacgtagaagatggtggagtccagttggcggaccactaccagcaaaatacaccgattggcgatggtccggttttgcttcccgacaatcactatcttagccaccagagtaaactgagtaaggacccaaatgaaaagcgcgaccacatggtattgaaagagcgcgttacagcagctggaattacacacgatatggacgaactttataagtaatagggataacagggtaatcgcaaaaaaccccgcttcggcggggttttttcgcgtttaaacgtgccagggcgtgcccttgggctccccgggcgcgttttttacgcgttctagagtccttactgcagtagttttgctgaaatactcgattcacaaaaatatcaacttatggttgttttgtgagatatcaatatatggttgttttgtggttaagttgctgattataaataattattaaatatcactttatggttgcatcaacaggtaccgagctctcatctgttacgctcggcgtgtagccggccagcctcgcagagcaggattcccgttgagcaccgccaggtgcgaataagggacagtgaagaaggaacacccgctcgcgggtgggcctacttcacctatcctgcccggctgatcgccgttggatacaccaaggaaagtctacacgaaccctttggcaaaatcctgtatatcgtgcgaaaaaggatggatataccgaaaaaatcgctataatgaccccgaagcagggttatgcagcggaaaagcgcttatcagcggtaccggtagctcggctgtgaatgaaatggacttaccaattaaagtaaaaggtgatgatttattcatcaaagtttttgtgccagtgtaaaccattttccaaactgtttaagagtgatttacaacgcgtagcatgtttactttgcgttttataaagctgtatttggtagctttatgccatctattgcttcaatactatgccaatatacacttcacttaccacgctgtaagttaataaaaccgagtttggttatgtcaacttatacttcaaacaacatttgggtgaaaatacattcctttttgacgtcaggtggcacttttcccggtaaaccagcaatagacataagcggctatttaacgaccctgccctgaaccgacgaccgggtcatcgtggccggatcttgcggcccctcggcttgaacgaattgttagacattatttgccgactaccttggtgatctcgcctttcacgtagtggacaaattcttccaactgatctgcgcgcgaggccaagcgatcttcttcttgtccaagataagcctgtctagcttcaagtatgacgggctgatactgggccggcaggcgctccattgcccagtcggcagcgacatccttcggcgcgattttgccggttactgcgctgtaccaaatgcgggacaacgtaagcactacatttcgctcatcgccagcccagtcgggcggcgagttccatagcgttaaggtttcatttagcgcctcaaatagatcctgttcaggaaccggatcaaagagttcctccgccgctggacctaccaaggcaacgctatgttctcttgcttttgtcagcaagatagccagatcaatgtcgatcgtggctggctcgaagatacctgcaagaatgtcattgcgctgccattctccaaattgcagttcgcgcttagctggataacgccacggaatgatgtcgtcgtgcacaacaatggtgacttctacagcgcggagaatctcgctctctccaggggaagccgaagtttccaaaaggtcgttgatcaaagctcgccgcgttgtttcatcaagccttacggtcaccgtaaccagcaaatcaatatcactgtgtggcttcaggccgccatccactgcggagccgtacaaatgtacggccagcaacgtcggttcgagatggcgctcgatgacgccaactacctctgatagttgagtcgatacttcggcgatcaccgcttccctcat

SEQ ID NO: 51 - DNA, 15655 bp, synthetic construct
  source 1..15655: mol_type = other DNA
gcgctgcggacacatacaaagttacccacagattccgtggataagcaggggactaacatgtgaggcaaaacagcagggccgcgccggtggcgtttttccataggctccgccctcctgccagagttcacataaacagacgcttttccggtgcatctgtgggagccgtgaggctcaaccatgaatctgacagtacgggcgaaacccgacaggacttaaagatccccaccgtttccggcgggtcgctccctcttgcgctctcctgttccgaccctgccgtttaccggatacctgttccgcctttctcccttacgggaagtgtggcgctttctcatagctcacacactggtatctcggctcggtgtaggtcgttcgctccaagctgggctgtaagcaagaactccccgttcagcccgactgctgcgccttatccggtaactgttcacttgagtccaacccggaaaagcacggtaaaacgccactggcagcagccattggtaactgggagttcgcagaggatttgtttagctaaacacgcggttgctcttgaagtgtgcgccaaagtccggctacactggaaggacagatttggttgctgtgctctgcgaaagccagttaccacggttaagcagttccccaactgacttaaccttcgatcaaaccacctccccaggtggttttttcgtttacagggcaaaagattacgcgcagaaaaaaaggatctcaagaagatcctttgatcttttctactgaaccgctctagatcaagccacttcctttttgcattgacgcagggtgtcggaaggcaactcgccgaacgcgctcctatagttttcagcgaagcgtcccaaatgtaagaagccgtagtctagggctatctcagttatactacgcacattggcactgggatcgttcaagcaggcgcggatgctttcgagcttgcggttgcggatgtagttcttcggcgtggtgccggcgtgcttctcgaacaaattgtagagcgagcgtggactcatcatcgccagctccgctaaccgctcaaggctgatattccgtttgagattctcctcaatgaattgaacgactcgctcgaaagacgggttacctttgctgaaaatttcacggctgacattgctgcccagcatttcgagcagcttggaagcgatgatccccgcatagtgctcttggacccgaggcatcgactttgtatgttccgcttcgtcacaaactaacccgagtagattgataaagccatcgagttgctggagattgtgtcgcgcggcgaaacggataccctccctcggcttgtgccaattgttgtcactgcacgcccgatcaaggaccactgagggcaatttaacgataaatttctcgcaatcttctgaataggtcaggtcggcttggtcatccggattgagcagcaatagttcgcccggcgcaaaatagtgctcctggccatggccacgccacaggcaatggcctttgagtattatttgcagatgataacatgtttctaatccaggcgagattaccctcacgctaccgccgtagctgattcgacacagatcgaggcatccgaagattctgtggtgcagcctgcctgccgggcgcccgcccttgggcaggcgaatagagtgcgtaccgacatactggttaacataatcggagactgcatagggctcggcgtggacgaagatctgacttttctcgttcaataagcaaaaatccatagttcacggttctcttattttaatgtgggctgcttggtgtgatgtagaaaggcgccaagtcgatgaaaatgcatctcgacgtgatgcgtatacgggttacccccattgccacgttgcgccatcctttttgcaatcagtgaccacttttccaagcaaaaataacgccaagcagaacgaagacgttctttttaagaagcgagaacaccagaagttcgtgctgtcggggcatggggcgacgaattggcggataaaggggatctagtccagccttgcaagaagcggatacaggagtgcaaaaaatggctatctctagtaaggcctaccccttaggctttatgcaagtcgacgtgacctgccgtataggcagctgaaaatttcggaccatgcgccgatctggctcgaactgggtgacctgccgtataggcagctgaaaattagcgaattccgagcgaaggagatatacatatggcttttctattttctcccaaggctcgggcattttctgacgaatcgctggaaagttacttgttacgggtcgtttcagagaatttttttgactcgtatgaagggctcagcttagctattcgcgaagagctgcatgagcttgattttgaggcgcatggtgcattcccagtagatttaaagaggctcaatgtttaccacgccaaacataatagccattttaggatgcgggctttaggactactcgaaacactactagatttacctcgatacgagctacaaaagttggctttgctaaagtcagatattaaatttaactcctccgtcgctttatataacaatggcgtagacattcccctgaggtttattcgtcaccacgccgaggaagctgttgattcgattccggtatgctcacaatgtcttgcagaagaagcctatataaaacaaagttggcatataaagtgggtaaatgcatgcactaaacatcagtgtgctttgctacataactgcccagaatgctacgctccaattaactatatcgagaatgagtcaattactcattgttcatgcggttttgagctgtcttgcgctagtacctcgcctgtaaatacgttaagtattgaacatttaaataaattactggataaaggtgagcgcaacgatagtaacccgctatttaacaatatgactcttacagaacgttttgctgcgcttctttggtatcaggagcggtattctcaaacagataacttttgtttaaatgatgctgtgaactattttagtaaatggccagcagtttttaatacagagcttgatgaactaagtaaaaatgcagaaatgaagttaatagatctgtttaataaaactgagtttaagtttatttttggggatgctattttagcttgccccagtactcaaaagcagagtgaatctcactttatttatagggctctattagattatttagttactttagttgagagtaaccctaaaactaaaaagcccaacgcagccgacttattagtaagtgtattggaggctgcaactttattaggtacttcagtagagcaggtttataggttgtaccaaaatggtattttgcaaacggcatttcgtcataaaatgaaccagcggatcaacccttataagggcgcgttttttttaagacatgttatagagtacaaaaccagttttggaaatgacaaagctagaatgtatttgtcggcatggtgagtatatgcatcttaaggaactgctagagattacagacaccactgagcgggataggtcattacgtcgtgcttttagcccttatacggcaatgattgatataacaggcagcgaagccgttgccctgattattttgttaaacctgacttatcgaaaaaaccaagttgatgacttgctggataaaaagctcgcaaaacaggctttaaaaagtgaagaccatattaataaatgtattaaggaaatagcgtggtttcatactcataatttaaagtaccctgacattagagtcagtaagcaaaatttagccgtagagcctccaacactgcactcttatgttttgagtagtgctaactatcctaaagcctatggctggtcacataactcagctaaagttaattttgctaaattatttgttagttactttaaatggcaaaatcaagtcagttggctggcacaagtattagctacgaactcggataactggaaatccgcatttacctctcttgggttatccgttaaggcatttaaaagtttatgtgtaaccgttaaaaattcattgcctgaagaggccattcccgactctgttgaccgctactctcgccaaattagaatgccttatcatgatggttacttagctgttacgcctgtaattagccatgttgttcaatcaaaaattcaacaggcggcaattgataaacgagcccgatttagcaatgtagagtttacgcgtcctgctgctgtcagtatgttagctgcttccttaggtggtgttattaatgtgcttaattaccctccttatatacgaagtaaatatcatggtttaagtaactcacgagcatttaaattaaataatgggcaaacagtatttaacgttgaggcactattaaagccggaattaattaaagccttagaaggtattatatttagtaataatgcgctggctcttaaacagcgtagacaacaaaaagtaaaaaatattaaagagctgagaaacacgcttttagaatggttttcacctgtatttgaatggcgcttggacgctattgagaatgggtatgacttagaacagcttgagagtgcttcagagcgactagagtataaaatactatcgctacccgacaatgaactcccttcgctaacgattcctttatttaggttactaaatgaaatgcttggcggtgtgagcatgacacaaaggtatgcttttcatcctaaattaatgagccctttaaaagcagctttacaatggttgcttgttaatcttacagatcaaaaacatgtactgattgaagaagatgatgaacattatcgctatcttcatttaagcggtatacgtgtgtttgatgcgcaagcattatcaaacccttactgctcaggtattccatctttaaccgctgtttggggtatgattcacagctaccaaagaaaacttaatgaggcgctaggaacaaatgtacggttcacatccttttcttggtttattaggaattattctgctgtagcaggaaaaaaacttcctgaactgagccttcaaggcgctcagcaaagtaggctcaagcggccaggaattatcgatggcaaatactgtgatttggtatttgatttaataatacacattgatggttatgaagatgacttacaggcagtagatagtaagcctgacattttgaaagcgcattttccatctaactttgcaggtggtgttatgcatcagcctgagcttaactcaaatataaattggtgctgtttatatagtaatgaaaatcagttatttgaaaagttaaggcgactccctttatctggttgttgggttatgccaactgagcacaaaatacaggatttagatgagctactcttattattaaatagtgactctaaactaagcccatctatgatgggatatatgttactcaccgaaccgatggctagagttggatcacttgaaagactgcattgttatgctgaaccagcaataggagtggtgaaatacgaagcggccactagtgtaaggctaaaaggtattggtaactattttaatagcgctttttggatgctagatgcacaagaaaagtttatgctaatgaaaaaagtttaaccggaaaatacttaatggagctctgtaatatattaaaatatgatcgctcgctttaccctggtaaagctgtgtttttttataaaacggctgactctgattttgttccactagaggctgatattaataaaattcgaggccctaaatctggttttactgaagcattcaccccacagttttccccaaaaaacatctcacctcaggacttaacacataataatatattaactctcgaagagtgttatgtacctccaaatgtggagcatatattttgtcggttttctttgagagtacaggctaactcgttggtcccttcaggctgtagtgatccagaggttttttctttattaaaagagttggcagaaacatttaaagaatgcggtggttataaagaactagcagtaagatattgtcgaaatattttgataggtacatggctttggcgtaatcaaaacaccggcaacactcaaattgaaattaaaaccagcaaagggagttgttatttaatcgataacactcgtaagttagcttgggaaagcaaatgggcttctgatgatctaaaagtattggaagagcttagtaatgaaattgagagcgcattaactgatcccaatgtgttttggagtgctgatataaccgcgaaaatagaagcctcattttgccaagagatttacccaagccaaatccttaacgacaaggttaagcaaggagaggcctcaaaacagtttgtaaaagctaagtgtgcagatggccgttacgctgtaagttttaattcagtaaaaataggagcagcccttcagtcaatagatgattggtgggatgaggatgcaagtaaaagattacgagtgcatgagtttggtgctgataaagaaataggggttgcccgacgtcctcctgattctgaacagaatttttattctattttcaaaaatacggaatggtatttgtcagcccttaaaaattgcattactaataaaaatgaaaaaatagacccagctatttattacttattctctgtattgattaagggcggaatgttccagaaaaaagcagaggctaaaaaggcgtaattatgcaaaggtattacttcacagtccactttttaccaaaacaagctaatctagcgctgcttactggccgttgtatttctattatgcatgggtttattttgaagcataatattgaaggaatgggggttacgtttcctgcatggtcggactcatcaattggtaatgaaattgcttttgtttacacggacaaggagattttaaatacccttaaagatcaggcatattttgtggacatgcaagattgtggcttttttaaagtaagccaagttttagctgtacctgacagctgcgaagaagtacgttttatacgtaatcaggcggtagcaaaaattttcacaggtgaaagtagaagaagattaaagcgcctgcaaaaaagagcgttagcaagaggtgaagattttaatcctaaaaagatcgaagctccccgagagattgatattttccatagagtggctatgactagtaagagttcacaagaggattatattctgcatattcaaaagcaagatgttgactgccaagctgagccatactttagtaattatgggcttgcctcaaatgaaaagtttaaaggcacggttccggatttatcaccctcaatagatagaaattaacctttaataaggagatatagcatgtatatacgcaacttgagaaagccatctccaaataaaaatgtatttaaatttgcgagcactaaagttagtagtgtagttatgtgtgagagttcattagagtttgatgcatgttttcatcatgaatataacgatttgatagagagttttgggagtcagcctgaaggctttaaatatgagtttatgggtaaaagtttaccttacacaccagatgcactgatttcatatacagataaaacccaaaaataccacgaatataagccctattctaaaattgcttctccactatttagagctgaatttgctgccaaaagagctgcatcattaaaattggggattgatcttgttttagtaactgataggcaaattagggtaaatccaatattaaacaacttaaagttattacaccgctactcaggtgtttatggtatcagcggcattcaaaaagagttgctcagttttattcataaatcaggggtaatcaagctaaatgatataagctctcaggttgggataccaattggtgaaacacgatcttttttatttgggctcatgcataaagggttggttaaggctgatctagggtgtgatgatttaactaataatccaacattatgggctacaccatgactgacttttttaatgaatttgatgaaagcctggtaccattaaagccacaaacgcccacacaatacgtcaaattagatgatgccaacttaatccagcgtgatttggataccttttcagatacctttaaaaaccaagcactacaaaggtataagctaattagcactatagataaaaaactttcacgcggctggacccaacgaaatttagatcctattttagatgagctttttaaaggaggtgacgtagttcggccaaattggcgaactgttgctcgttggcgcaaaaaatatatcgaaagcaacggtgatatagcctcccttgctgataaaaaccacaaaatgggaaacagaactaaccgtataaaaggggatgataaattttttgataaagcattagaacgatttttagatgctaaaagacctactatagcaactgcatatcagtactataaagaccttattgttattgaaaatgagagtattgtcgaaggcaagattccaataatatcctacaatgcgtttaataaaagaatcaaagcaatacccccatacgcggtcgcggtcgcaaggcatggtaaatttaaagcagaccaatggtttgcttactgcgctgcgcacgtacccccgacaagaatattagagcgtgtagagattgatcatacaccacttgatttaatcctacttgatgatgagttacttattcccataggaagaccttacctaacattacttattgatgtatttagtggctgtgttcttggttttcatcttagttataaatccccttcctacgtatctgctgctaaggctattactcatgcgattaaaccaaagtctcttgatgctctgaatatagaactacaaaatgattggccttgctttggtaaatttgaaaatttagttgtagataatggtgctgagttttggtctaaaaacttagagcatgcttgtcagtcagcaggaataaatatccaatataaccctgtgcgcaagccttggctaaaaccctttatagagcgtttttttggggtgatgaatgaatatttcttacctgaattaccaggaaagacattttcaaatattttagaaaaagaagagtataaacctgagaaagatgcaattatgcgcttctcaacttttgttgaagaatttcaccgctggatcgcggatgtgtatcatcaagacagtaattcacgtgaaactcgaatcccaattaaacgttggcaacaagggtttgatgcatatcccccattgaccatgaatgaagaggaggaaacgcgtttttcaatgttaatgcgcatctcagactcaagaacgttaacgagaaatgggtttaaatatcaagagttaatgtatgactcaacagctttggctgattatcgtaaacattatccgcaaacaaaagaaactgtaaaaaaactgattaaagtagaccctgatgacatctcaaaaatttatgtttatttagaagagttagaaagttatctcgaagtaccgtgtacagatcctaccggctatacggatggtttaagtatctatgagcataaaacaataaaaaaaattaacagggaagtcatacgggaatctaaagatagtttgggcttagcgaaagcacgcatggctattcatgagcgagtaaagcaagagcaagaagttttcattgaatcaaaaactaaagctaagataacagctgttaaaaagcaagctcaaatagctgatgtaagtaatacaggaacgagcactattaaggtttctgaagaaagtgcagcccctgtgcaaaaacatataagtaacgataattctgacgactgggatgatgacttagaggcatttgaatgaatgccttaacagagatacagatagagaagcttcggaactttagcgattgcatcgttatgcacccgcaaattaaaacaatttttaatgactttgatgaattaagattaaaccgtaaatttcagtcagaccaacagtgtatgctattaattggtgatacaggtgttggaaaaagtcataccattaatcactacaaaaaaagagttctagctacacagaattatagtcgaaacactatgccagtcttagtaagtcgtatatctagggggaaaggcttagatgctactttagtccaaatgctggcagatctggagctatttggaagtagtcaaattaaaaagcgaggctacaaaacagaccttactaaaaagctcgtagagagcttaattaaagctcaagtagagctactcatcattaatgagtttcaggagttaatagagtttaaaagcgtacaagaacgacaacaaattgcaaatgggttaaagtttattagtgaagaggccaaagtgccaatagtactggttggtatgccttgggctgcaaaaatagctgaagaacctcaatgggcttctcgcttagttagaaaaagaaaacttgaatactttagcctaaaaaatgacagcaagtactttcgccaatatttgatggggttagctaagaaaatgccatttgatgtacctcctaagctcgaaagtaaaaataccacaatagcgttgtttgctgcatgtcgaggtgagaatcgagcccttaaacatctactgttggaggctttaaaattagcactaagttgtaatgagtatcttgaaaataaacattttattactgcttatgacaagtttgatttttttaatgataaggaaaaactaaaatcaaaaaatccttttaaacaagacattaaagatattgaaatttatgaggtaatcaaaaactcatcttataacccaaatgcattagacccagaagatatgctcacagatcgagtgtttgcaatagtaaagtaacctaggctgctgccaccgctgagcaataactagcataaccccttggggcctctaaacgggtcttgaggggttttttgctgaaacctcaggcatttgagaagcacacggtcacactgcttccggtagtcaataaacgaggaagcggaagagcgtgttgatcggctttaaggatctagtgtcgctgcaaccatagtttgacataatgcaaccataccttgacataattaaagtcatactctgacataaagccccttattaaaaatgatgctaaaaataaattccattataatcaattatttaagaattaattaaaccatagtgtgacatagtggctttttatttgtatagtatgtgtactcaaataataaaaatttacttatgtatatacgcaacttaagaaagccatctccaaataaaaatgtatttaagaggcagtccctcttagaggatcctactaggagcacgtgttgacaattaatcatcggcatagtatatcggcatagtataatacgacaaggtgaggaactaaaccatgaacatcaaaaagtttgcaaaacaagcaacagtattaacctttactaccgcactgctggcaggaggcgcaactcaagcgtttgcgaaagaaacgaaccaaaagccatataaggaaacatacggcatttcccatattacacgccatgatatgctgcaaatccctgaacagcaaaaaaatgaaaaatataaagttcctgagttcgattcgtccacaattaaaaatatctcttctgcaaaaggcctggacgtttgggacagctggccattacaaaacactgacggcactgtcgcaaactatcacggctaccacatcgtctttgcattagccggagatcctaaaaatgcggatgacacatcgatttacatgttctatcaaaaagtcggcgaaacttctattgacagctggaaaaacgctggccgcgtctttaaagacagcgacaaattcgatgcaaatgattctatcctaaaagaccaaacacaagaatggtcaggttcagccacatttacatctgacggaaaaatccgtttattctacactgatttctccggtaaacattacggcaaacaaacactgacaactgcacaagttaacgtatcagcatcagacagctctttgaacatcaacggtgtagaggattataaatcaatctttgacggtgacggaaaaacgtatcaaaatgtacagcagttcatcgatgaaggcaactacagctcaggcgacaaccatacgctgagagatcctcactacgtagaagataaaggccacaaatacttagtatttgaagcaaacactggaactgaagatggctaccaaggcgaagaatctttatttaacaaagcatactatggcaaaagcacatcattcttccgtcaagaaagtcaaaaacttctgcaaagcgataaaaaacgcacggctgagttagcaaacggcgctctcggtatgattgagctaaacgatgattacacactgaaaaaagtgatgaaaccgctgattgcatctaacacagtaacagatgaaattgaacgcgcgaacgtctttaaaatgaacggcaaatggtacctgttcactgactcccgcggatcaaaaatgacgattgacggcattacgtctaacgatatttacatgcttggttatgtttctaattctttaactggcccatacaagccgctgaacaaaactggccttgtgttaaaaatggatcttgatcctaacgatgtaacctttacttactcacacttcgctgtacctcaagcgaaaggaaacaatgtcgtgattacaagctatatgacaaacagaggattctacgcagacaaacaatcaacgtttgcgcctagcttcctgctgaacatcaaaggcaagaaaacatctgttgtcaaagacagcatccttgaacaaggacaattaacagttaacaaataaggaggacaatcatgaaatctaacaatgcgctcatcgtcatcctcggcaccgtcaccctggatgctgtaggcataggcttggttatgccggtactgccgggcctcttgcgggatatcgtccattccgacagcatcgccagtcactatggcgtgctgctagcgctatatgcgttgatgcaatttctatgcgcacccgttctcggagcactgtccgaccgctttggccgccgcccagtcctgctcgcttcgctacttggagccactatcgactacgcgatcatggcgaccacacccgtcctgtggatcctctacgccggacgcatcgtggccggcatcaccggcgccacaggtgcggttgctggcgcctatatcgccgacatcaccgatggggaagatcgggctcgccacttcgggctcatgagcgcttgtttcggcgtgggtatggtggcaggccccgtggccgggggactgttgggcgccatctccttgcatgcaccattccttgcggcggcggtgctcaacggcctcaacctactactgggctgcttcctaatgcaggagtcgcataagggagagcgtcgaccgatgcccttgagagccttcaacccagtcagctccttccggtgggcgcggggcatgactatcgtcgccgcacttatgactgtcttctttatcatgcaactcgtaggacaggtgccggcagcgctctgggtcattttcggcgaggaccgctttcgctggagcgcgacgatgatcggcctgtcgcttgcggtattcggaatcttgcacgccctcgctcaagccttcgtcactggtcccgccaccaaacgtttcggcgagaagcaggccattatcgccggcatggcggccgacgcgctgggctacgtcttgctggcgttcgcgacgcgaggctggatggccttccccattatgattcttctcgcttccggcggcatcgggatgcccgcgttgcaggccatgctgtccaggcaggtagatgacgaccatcagggacagcttcaaggatcgctcgcggctcttaccagcctaacttcgatcactggaccgctgatcgtcacggcgatttatgccgcctcggcgagcacatggaacgggttggcatggattgtaggcgccgccctataccttgtctgcctccccgcgttgcgtcgcggtgcatggagccgggccacctcgacctgatgtccgatcatctgttacgccggcggtagccggccagcctcgcagagcaggattcccgttgagcaccgccaggtgcgaataagggacagtgaagaaggaacacccgctcgcgggtgggcctacttcacctatcctgcccggctgacgccgttggatacaccaaggaaagtctacacgaaccctttggcaaaatcctgtatatcgtgcgaaaaaggatggatataccgaaaaaatcgctataatgaccccgaagcagggttatgcagcggaaaagcgctctttgttgatacaaccataaaatgataattacacccataaattgataattatcacacccataaattgatattgcctcttcatggtctaaacttcagtaagtttacgacattttcctcgaggtcatttccggggatccgcgatcgcttctccttacgcatctgtgcggtatttcaggtaccctgcccaagtcttatgaatgccgtataggcagctgaagataaaaacaatcgattcgatgtttaagttaatgtaattctgccgaaaaggcagtgagtagtaattgaaaaaaccagtcttatatccgggctggtttttttgtttttagcgttataacttttatttcactatgtcactgtatggttgcattttatgtcagtgaatggttgcaggttttttgtaagttattgatatgcctatccagtgtatgtcacgctttgcttgcagcgacatctaggatcttagcgcgcttttatggacgtcaggtggcacttttcccggtaaaccagcaatagacataagcggctatttaacgaccctgccctgaaccgacgaccgggtcatcgtggccggatcttgcggcccctcggcttgaacgaattgttagacattatttgccgactaccttggtgatctcgcctttcacgtagtggacaaattcttccaactgatctgcgcgcgaggccaagcgatcttcttcttgtccaagataagcctgtctagcttcaagtatgacgggctgatactgggccggcaggcgctccattgcccagtcggcagcgacatccttcggcgcgattttgccggttactgcgctgtaccaaatgcgggacaacgtaagcactacatttcgctcatcgccagcccagtcgggcggcgagttccatagcgttaaggtttcatttagcgcctcaaatagatcctgttcaggaaccggatcaaagagttcctccgccgctggacctaccaaggcaacgctatgttctcttgcttttgtcagcaagatagccagatcaatgtcgatcgtggctggctcgaagatacctgcaagaatgtcattgcgctgccattctccaaattgcagttcgcgcttagctggataacgccacggaatgatgtcgtcgtgcacaacaatggtgacttctacagcgcggagaatctcgctctctccaggggaagccgaagtttccaaaaggtcgttgatcaaagctcgccgcgttgtttcatcaagccttacggtcaccgtaaccagcaaatcaatatcactgtgtggcttcaggccgccatccactgcggagccgtacaaatgtacggccagcaacgtcggttcgagatggcgctcgatgacgccaactacctctgatagttgagtcgatacttcggcgatcaccgcttccctcatactcttcctttttcaatattattgaagcatttatcagggttattgtctcatgagcggatacatatttgaatgtatttagaaaaataaacaaatagctagctcactcggtcgctacgctccgggcgtgagactgcggcgg

SEQ ID NO: 52 - DNA, 15683 bp, synthetic construct
  source 1..15683: mol_type = other DNA
actcttcctttttcaatattattgaagcatttatcagggttattgtctcatgagcggatacatatttgaatgtatttagaaaaataaacaaatagctagctcactcggtcgctacgctccgggcgtgagactgcggcgggcgctgcggacacatacaaagttacccacagattccgtggataagcaggggactaacatgtgaggcaaaacagcagggccgcgccggtggcgtttttccataggctccgccctcctgccagagttcacataaacagacgcttttccggtgcatctgtgggagccgtgaggctcaaccatgaatctgacagtacgggcgaaacccgacaggacttaaagatccccaccgtttccggcgggtcgctccctcttgcgctctcctgttccgaccctgccgtttaccggatacctgttccgcctttctcccttacgggaagtgtggcgctttctcatagctcacacactggtatctcggctcggtgtaggtcgttcgctccaagctgggctgtaagcaagaactccccgttcagcccgactgctgcgccttatccggtaactgttcacttgagtccaacccggaaaagcacggtaaaacgccactggcagcagccattggtaactgggagttcgcagaggatttgtttagctaaacacgcggttgctcttgaagtgtgcgccaaagtccggctacactggaaggacagatttggttgctgtgctctgcgaaagccagttaccacggttaagcagttccccaactgacttaaccttcgatcaaaccacctccccaggtggttttttcgtttacagggcaaaagattacgcgcagaaaaaaaggatctcaagaagatcctttgatcttttctactgaaccgctctagatcaagccacttcctttttgcattgacgcagggtgtcggaaggcaactcgccgaacgcgctcctatagttttcagcgaagcgtcccaaatgtaagaagccgtagtctagggctatctcagttatactacgcacattggcactgggatcgttcaagcaggcgcggatgctttcgagcttgcggttgcggatgtagttcttcggcgtggtgccggcgtgcttctcgaacaaattgtagagcgagcgtggactcatcatcgccagctccgctaaccgctcaaggctgatattccgtttgagattctcctcaatgaattgaacgactcgctcgaaagacgggttacctttgctgaaaatttcacggctgacattgctgcccagcatttcgagcagcttggaagcgatgatccccgcatagtgctcttggacccgaggcatcgactttgtatgttccgcttcgtcacaaactaacccgagtagattgataaagccatcgagttgctggagattgtgtcgcgcggcgaaacggataccctccctcggcttgtgccaattgttgtcactgcacgcccgatcaaggaccactgagggcaatttaacgataaatttctcgcaatcttctgaataggtcaggtcggcttggtcatccggattgagcagcaatagttcgcccggcgcaaaatagtgctcctggccatggccacgccacaggcaatggcctttgagtattatttgcagatgataacatgtttctaatccaggcgagattaccctcacgctaccgccgtagctgattcgacacagatcgaggcatccgaagattctgtggtgcagcctgcctgccgggcgcccgcccttgggcaggcgaatagagtgcgtaccgacatactggttaacataatcggagactgcatagggctcggcgtggacgaagatctgacttttctcgttcaataagcaaaaatccatagttcacggttctcttattttaatgtgggctgcttggtgtgatgtagaaaggcgccaagtcgatgaaaatgcatctcgacgtgatgcgtatacgggttacccccattgccacgttgcgccatcctttttgcaatcagtgaccacttttccaagcaaaaataacgccaagcagaacgaagacgttctttttaagaagcgagaacaccagaagttcgtgctgtcggggcatggggcgacgaattggcggataaaggggatctagtccagccttgcaagaagcggatacaggagtgcaaaaaatggctatctctagtaaggcctaccccttaggctttatgcaactagtgtgaactgccgagtaggtagctggaaatatcacctgcctggtggcctttgcggtgttccagtgaactgccgagtaggtagctggaaattagccaattggaattccgagcgaaggagatatacatatgcattttttagttcaaacaaaactttatcctgatgaggctcttgaaagctatttgctaaggcttgctagggataactcatacgatggctatagtgagcttgctgatattttatggcaatggcttgtagagcaagatcatgatcttgaaggtgcgttgccgttagagctgggtaaagttgatgtttatcatgctaggcaagcgagtagctttagaataagagcgctcaagttggtagctcaattagctgatgtaaacgctggtaatattcttgcgcttgcatggcggcgcagtaattttaaatttggcaacttagtagcagtaagccgtaatgagcagacaattcctcttgagttacttcgcactgataatatacctgtttgcattgaatgcttgtttgaatcttcttacgttccttttcattggcatttaaagccctataagacgtgccataagcataaatcacaattaactacacattgtaaggaatgccataacttaattgattacagagcttctgaggagtttttagagtgcagttgtggttgtaaactaaccaatagtgaacagttaaacgatgcagactttaaaattgcatttgcgcttgcaagtagtaacagccataaaatagtggggttaatatcttggtttgcgaaggttaagcaacttgatgtaagcgatgctgactttaaccgtacttttgttgattactttagtacttggcctgaaagccttactactgaattagatttactcacaaacaatgcgcgcctcaagcaacttaacccttttaataaaactaagttcaactctgtttatggaaatgtgatccgtgatggtcaaatagctgcaacaagtaaccgtaaaaacaaagtacttgatgaactaattaaatattttgttgaattagttgatagtaatcctaaaactaaacatccaaatattgcagatttactgctttgtacttttgataccgcagtattattaaacaccaccacagagcaagtttataggcttcatcaagaaggctttttaaactgcgcttacccacaaaaaaagcacgaacagctcagagctgatagtcatgttttttatttacgccaagtgattgagctacagcaagcattcgcagctgaaacgcctcaaacaaaaaaacaatttatagcgccgtggtaacttatgaacttacaagatgcatttgcgattgaatcacttaaggaaaaaaccacagcacttagaaagttgtttactccatatatgtctcatgttgcggtagatggctttgaagaacaagcgctgactgtgctcattaacctagtttataaacgaagtgagattgatgatttaacaagtacaagaaccgctaaaagtgtattacgtgatgaagtgttactgagtaaatgtattaacgaagttaaatggtttcatactcataatttaaaatatcctgatatacgcgtaagccatcaacgtttaattagtaaggtagtaagtgaagatattgcgggtatttgtagccggtcattacctttaagttttggatggtcgcacaacagtgctgaaattaatcatgcaaagttatttttaacctcatttacttggcaaggtgaagtaacttgtttagcaaatttactaataaatgaggagcctgtttggattaatttaataaggacatacgggtttactaaaaaggcggttttaggcatcgcgggtaaaataaaacagcttttgccagtggcagaactcccattagaagtaagctctttttcaccacaattacaaatgccatttcagcaaagctaccttgcggttacgcctgtagtaagtcacgcaatgctggctaaaattcagcaattaacaacagatcgtaagttaaattttggtttagttgagcactcaagacctgccaatgttggcgatttagcaagctcagtaggtggtaatattagagtgctgcgttactttcctaaaacatattcaaaggctgttaactgctctgaagtattcaataatgatagtgagaaagcatttaaaattcgtgcgctattaaacagtcaatttcaacaggcgcttttggtattggtcggtattaaacagtttaatacgttaaggcaaaagcgattagcgcgagtagcggctattaggcaagtacgtgttagcttgcagttgtggctggataacattctggaagctaaaaataacgctcaagggcaagcctaccctgagtgggcaaagcattacttagatcagagtattactaactgcattagccaatttagtaacgtactaaatgagagccttggtaatttaagtaagctcaaacgctttgcgtatcaccctaatttaatgggggtgtttaaaacgcagttaaactatgtgtttactcactgtattcctgatgaagaaacattaaatgatgagcaaatagtgtatgtgcattgccaagatatgcgagtgtttgatgctgaggcaatggctaatccgtatattcaaggtatgccgtcacttacagctttaaatgggcttgctcataactttgagcgtaagctaaaaaattttatagacccttcaattaagtgtattggtagtgccattaacattgaaagttatcaactacatacaggtaaaccattacctgaaccaagtaagttaaaacaagttgctggccgtagtcatgtcataagatcaggaattatcgataaacctaaatgcgatataacactcgatttagtctttaggctttttgtaccaaacattaagctgttagataagttaaatagtcagcttgtgaaacccgcactaccatctatgtttgcaggcgggactatgcatccaccttcgttataccaaaatattgactggtgccatttacatactaaaccaagtgagctgtttaaaaatataaaggcaaaatcgttaaatggcagttggttgtacccttcaaaaaaagtagtcaaaagttttgaacagttgattgatgcgcttaacggtaactttaatttaagacctgctgccattggttttgctgcgcttgaagaacccataaagcgagatgtagccttacatgaataccattgttatgctgagcccgtaattgggcttttagagtgtgttagcaatacatcagttaagtacgcaggggctaagcagttcttccatgacgcattttgggttatggatgttcaaaaagagtctatgcttatgaaaaagtctaagtttgagtatgaataatgcaattacctcggcatttaagttacacgcgttcgctttcacccagtaaagcggtatttttttataaaacatcggagtctgattttgaaccgctgcaaatagagcaaaataagcttgttgggcaaaagtcagggtttggcgatgcgtatcaaaagcaaaatgtggctaaaaatttagcgccacaagatctagcgtttggaaacccacaaacgattgatgtgtgctacgtacctccagcagtaaatgagctattttgccgtttttcactcagggttgaggctaatagcaatgaaccacacgtttgtgatgaccctaaagttatttattggttaaaacggttttttgaaacctacaaaaaacacaatggtcttaatgaagttgcaactcgctatgctaaaaatatactgatggggaactggctttggcgtaaccgccaatcaccaaatgttgatattgaaatccttactgaacatgcagccccgatcattgttgaaggtgcacaaaaactaaaatggcaaggcaactggcaaaacaatcaaacagcattaataacattatcagaagctattcaagaagggcttagcaatcctcaaaattattgttatttagatataaccgcaaaaattaaaaatgcatttagccaagaggttcaccctagtcaaaagtttgtagacaatgttgaacaaggcatgtcatctaaacaacttgcatacactcaagtcggcgataaaaaagcagccagtttaaactcacaaaaagtaggggctgcgattcaaactattgatgattggtatgagggaggttacaaacctttacgcactcacgagtatggtgcagataagcaaatattagttgcacatagaacgcctaagagccattcagacttttattcattacttccgcgcattgccttgcatattaagcacatggaaaagcatggtttagagcaaagtgaagaatcaaacgcagttcactttattgcagcagtgttgatcaaaggcggcttgttccaaaggagtaaggcatgaagcgctattattttactattacttatttacctaaaaattgtgatgtaagcctccttgcagggcgttgtatcggcatattgcatgggtttatgagttcgcgtgaaattagtaatataggtgtgtgttttcctaaatggaatgagcaagagataggtaatgaattggcgtttgtatcgacagataaaaagcaattaaccaatctatctcagcaaagctattttgagatgatggctcaggataaattatttggcttatcaaaaatactcgaagtaccaacaaaccaaaatgaggttatgtttattcgcaaccaatcagtagctaaggcttttgttggcgaaaagcaaagacgtttaaaacgcgctaaaaaacgagctgaagccagaggtgaagtttataatcctgaatatcaatttgaggcaaaagacataggccattttcattcaatacctgtatcaagcaaagccaacggccaaagttatgttctgcatatacaaaaaattgaaaatactaatgcgacagaaaatcaatttaataattatggctttgctacaaatcaaacatttcaaggtacggttccttctttgaatacccaataacctttaataaggagatatagcatgtacagaagaaaactcaaacactcccgtgttaaaaaccttcataaatttgctagtcaaaaaaataaatctacctgtttagttgaatcctctttagagtttgatgcctgttttcattttgaattttcaccatcaatagccgcatttgaggcacaaccactaggttatgaatatgagtttgataaccgtatttgccgttacacacctgactttttacttacccacacagacggcacgcaaaaatttatagaagtaaaaccgcaaagcaaaattgctgacgaggactttcgtgcacgttttattgaaaagcaaaccatcgctaaacaagatggacgcgacttaatactggttactgataaacaaatccgtgtatacccaacactcaataacttaaaacttttacatcgctattctggttttcagtctttaacagagctgcaagcatcggtgctcgagcttgttaagcaatacggctctattaaagtgggccagttagttaactttttaaaagtaactgccggtgagctacttgctactgtgctacgcttattatcactagggcagttatttgccgacttaactacaaatgaaatatcaatagaaacagcaatttggtctaacaatgtttaatgacggtttgtttgatgatgagtttaaccagccattaccaaaagtagaaaccaaactacctcaaaattacgccaaagatttacaagcccttcctgaaaaaattaaaaatacaacatttgctaaacttaaatatattcaatggcttgaggctaatattcaaggtggctggacacaaaaaaaccttgagcctttattgaaagtaatgcctgaagttgagggtgaaaaaaagcctagctggagaacagctgcacgatggtatagcgcttatacaaatgcagataaaaatatcatggcgctaataccaagccatcaaaaaaagggtaacagggagcgcgatacagccaccgataagttttttgaaaaagcacttgagcgttacttagtaaaagaaaagccatcagtggcttctgcttacaagtattacgcagacttagttatcattgaaaacgacagcgttgtgggcagtgttttaaagcctttaacatacaaagcgtttaaaaatagaatcgataatttaccgcaatacgacgtgatggtttctcgctatggtaagcgtcttgctgatattgcttttaataaagtagaagggcatacacggcctacccgagtactcgaaaaagttgaaattgaccatacaccgcttgatcttattttattagatgatgagctacatatcccgcttggtaggccaacacttaccatgttagtcgatgtgtatagccattgtattgttggcttctactttagcttcagcgagcctagctatgatgcagtaaggcgagcaatgctaaatgcaatgaaacctaaaagtgatgtggcaaaactatacccagatacgataaatgagtggaaatgtgctggcaaaattgaaactctcgttgttgataatggcgctgaattttggagtaacagccttgaacttgcttgtgaagaaattggtattaatactcaatataaccctgttgcaaagccgtggttaaaaccctttgtagaacgtatgtttggcacaattaacactgaattattagaccctgttcctggtaaaaccttttctaacattttacaaaagcatgaatacaatcccaaaaaagatgcaatcatgcgctttacaacctttatgcagctattccataaatgggtagtagacgtttaccatcaagatgccgatagccgctttaagtacatacctagccaactatgggagcaaggctttaatacgttaccgccaacagtgctgagtaatgctgatcttcaacaattagatgttgtgctcagtatttcaaaccatagggtgcttcgtaaaggtggaatacggctagaaaatttaagctacgacagtactgaactagccaactatagaaaacagtttagccataaagtatctcaagaagttttaattaaattaaaccccgatgatatttcttatatatatgtttacctcgataagctagagcattacataaaagtgccatgcatagatccaaacggttacacccaaaatttaagtttgaatcagcataaaataaatatacgtattcatcgcgattttatttccggatctatcgataatgtaggcttagcaaaagcgcgtatgtttattcataataaaattcaaaacgagtttgaagagttaaaaaatgcaccaaaacactcaaaagtaaaagggggtaaagcattagctaagcatcaaaatgtaagtagtgactcacaaaaatcaatagctcagagcgagccattagaacccaaaaaggttacacctaaagagcaaccaacagatagctgggatgactttatttcagacctagatggattttaattatgctgaccgataaacaaaaagcaaaacttaatgaatttcgcgatgtatttattgaatacccaataataactactgtatttaacgactttgacagattaagacttggtaaaggattagcgggcgaaaagccctgcatgctgttaaatggcgatacaggcacaggtaaaacagcactaataaaacagtataaagaacgccatttaccgcaatttattaatggagtgatgaaccaccctgtattagtaagccgcatacctagtaacccgacactagaatctactttagccgagcttcttaaagacttagggcaagtaggtagtacagagcgcaagctgagaataaacggtacgcggttaacgacatcattaataaaatgcctaaaaacgtgtggcacagagcttataattattgatgagtttcaagagctgattgagcacaaccaaggtaaaaagcgccgcgagattgctaatcgattaaaatacattaacgatgaagcgggtgtatcgattgtattggtgggtatgccgtgggcagaaaaaatagcagacgaaccccagtggtcatcgcgtttattagtaaggcggcagctgccttattttaaattatcagaaaacccaaagcattttgtacagttaataattggcctagctaaccgtatgccattcaccgaaaagccaaaattaagtgagcaagcaacagtatttgctttgttctcattgtcaaaaggctgttttagaactcttaaatactttttagatgatgccgtactttatgcattaatggataacgcgaaaaccctcacaaccaagcatctagttaaagcatttggagtactgtttcctgatgtaccaaacctatttaccttgcccgttgcagaaattacagcaagtgaagttgagcgctattcactttataaacttgaaagcgcccaagatgaagatccgtttatagcgactaagtttactgaccaaatgccgattagtcagttgttgaggaagtaacctaggctgctgccaccgctgagcaataactagcataaccccttggggcctctaaacgggtcttgaggggttttttgctgaaacctcaggcatttgagaagcacacggtcacactgcttccggtagtcaataaacgaggaagcggaagagcactgccacccaaattcctcatttggtgttgtttgaagtataagttgacatatttgtactaaaagatggcataaattggaagtataaggtggcatagtctagtatttaaccaaatggttagatggttgactcacatgtacagaagaaaactcaaacactcccgtgttaaaaaccttcataaatttgctagtcaaaaaaataaatctacctgtttagttgaatcctctttagagtttgatgcctgttttcattttgaattttcaccatcaatagccgattagacggacgcaatcttgggatccgagccccaactggggtaacctttgagttctctcagttgggggagcacgtgttgacaattaatcatcggcatagtatatcggcatagtataatacgacaaggtgaggaactaaaccatgtcacatctcgcagaactggttgccagtgcgaaggcggccattagccaggcgtcagatgttgccgcgttagataatgtgcgcgtcgaatatttgggtaaaaaagggcacttaacccttcagatgacgaccctgcgtgagctgccgccagaagagcgtccggcagctggtgcggttatcaacgaagcgaaagagcaggttcagcaggcgctgaatgcgcgtaaagcggaactggaaagcgctgcactgaatgcgcgtctggcggcggaaacgattgatgtctctctgccaggtcgtcgcattgaaaacggcggtctgcatccggttacccgtaccatcgaccgtatcgaaagtttcttcggtgagcttggctttaccgtggcaaccgggccggaaatcgaagacgattatcataacttcgatgctctgaacattcctggtcaccacccggcgcgcgctgaccacgacactttctggtttgacactacccgcctgctgcgtacccagacctctggcgtacagatccgcaccatgaaagcccagcagccaccgattcgtatcatcgcgcctggccgtgtttatcgtaacgactacgaccagactcacacgccgatgttccatcagatggaaggtctgattgttgataccaacatcagctttaccaacctgaaaggcacgctgcacgacttcctgcgtaacttctttgaggaagatttgcagattcgcttccgtccttcctacttcccgtttgccgaaccttctgcagaagtggacgtcatgggtaaaaacggtaaatggctggaagtgctgggctgcgggatggtgcatccgaacgtgttgcgtaacgttggcatcgacccggaagtttactctggtttcggcttcgggatggggatggagcgtctgactatgttgcgttacggcgtcaccgacctgcgttcattcttcgaaaacgatctgcgtttcctcaaacagtttaaataaggaggacaatcatgattgaacaagatggattgcacgcaggttctccggccgcttgggtggagaggctattcggctatgactgggcacaacagacaatcggctgctctgatgccgccgtgttccggctgtcagcgcaggggcgcccggttctttttgtcaagaccgacctgtccggtgccctgaatgaactgcaggacgaggcagcgcggctatcgtggctggccacgacgggcgttccttgcgcagctgtgctcgacgttgtcactgaagcgggaagggactggctgctattgggcgaagtgccggggcaggatctcctgtcatctcaccttgctcctgccgagaaagtatccatcatggctgatgcaatgcggcggctgcatacgcttgatccggctacctgcccattcgaccaccaagcgaaacatcgcatcgagcgagcacgtactcggatggaagccggtcttgtcgatcaggatgatctggacgaagagcatcaggggctcgcgccagccgaactgttcgccaggctcaaggcgcgcatgcccgacggcgaggatctcgtcgtgacccatggcgatgcctgcttgccgaatatcatggtggaaaatggccgcttttctggattcatcgactgtggccggctgggtgtggcggaccgctatcaggacatagcgttggctacccgtgatattgctgaagagcttggcggcgaatgggctgaccgcttcctcgtgctttacggtatcgccgctcccgattcgcagcgcatcgccttctatcgccttcttgacgagttcttctgacctaggctcgagtaatggtttcttagacgtcttgacagctagctcagtcctaggtataatgctagcctgtcaccggatgtgctttccggtctgatgagtccgtgaggacgaaacagcctctacaaataattttgtttaatactagagaaagaggggaaatactagatggtgtcgaaaggtgaggagcttttcacgggggtggttccaatcttagtcgagcttgatggtgacgtgaatggccataagtttagcgtgcgcggcgagggtgagggcgatgcgacgaacggtaaacttactttaaagtttatttgtactacaggcaaattaccggtcccgtggccgaccctggtcactacgcttgggtatggggtagcatgttttgcccgttaccctgaccacatgaaacagcacgatttctttaaatctgccatgcccgaagggtatgttcaggagcgcactatcagttttaaagacgacggaacgtacaaaactcgtgctgaagtaaagttcgaaggtgatacccttgtgaaccgtatcgtccttaaaggcatcgacttcaaagaggacggtaacattttaggccacaaattagagtacaacttcaattcacataaggtttatatcacagcagataagcaaaaaaatggcatcaaggcaaattttaagacccgccacaacgtagaagatggtggagtccagttggcggaccactaccagcaaaatacaccgattggcgatggtccggttttgcttcccgacaatcactatcttagccaccagagtaaactgagtaaggacccaaatgaaaagcgcgaccacatggtattgaaagagcgcgttacagcagctggaattacacacgatatggacgaactttataagtaatagggataacagggtaatcgcaaaaaaccccgcttcggcggggttttttcgcgtttaaacgtgccagggcgtgcccttgggctccccgggcgcgttttttacgcgttctagagtccttactgcagtagttttgctgaaatactcgattcacaaaaatatcaacttatggttgttttgtgagatatcaatatatggttgttttgtggttaagttgctgattataaataattattaaatatcactttatggttgcatcaacaggtaccgagctctcatctgttacgctcggcgtgtagccggccagcctcgcagagcaggattcccgttgagcaccgccaggtgcgaataagggacagtgaagaaggaacacccgctcgcgggtgggcctacttcacctatcctgcccggctgatcgccgttggatacaccaaggaaagtctacacgaaccctttggcaaaatcctgtatatcgtgcgaaaaaggatggatataccgaaaaaatcgctataatgaccccgaagcagggttatgcagcggaaaagcgcttatcagcggtaccggtagctcggctgtgaatgaaatggacttaccaattaaagtaaaaggtgatgatttattcatcaaagtttttgtgccagtgtaaaccattttccaaactgtttaagagtgatttacaacgcgtagcatgtttactttgcgttttataaagctgtatttggtagctttatgccatctattgcttcaatactatgccaatatacacttcacttaccacgctgtaagttaataaaaccgagtttggttatgtcaacttatacttcaaacaacatttgggtgaaaatacattcctttttgacgtcaggtggcacttttcccggtaaaccagcaatagacataagcggctatttaacgaccctgccctgaaccgacgaccgggtcatcgtggccggatcttgcggcccctcggcttgaacgaattgttagacattatttgccgactaccttggtgatctcgcctttcacgtagtggacaaattcttccaactgatctgcgcgcgaggccaagcgatcttcttcttgtccaagataagcctgtctagcttcaagtatgacgggctgatactgggccggcaggcgctccattgcccagtcggcagcgacatccttcggcgcgattttgccggttactgcgctgtaccaaatgcgggacaacgtaagcactacatttcgctcatcgccagcccagtcgggcggcgagttccatagcgttaaggtttcatttagcgcctcaaatagatcctgttcaggaaccggatcaaagagttcctccgccgctggacctaccaaggcaacgctatgttctcttgcttttgtcagcaagatagccagatcaatgtcgatcgtggctggctcgaagatacctgcaagaatgtcattgcgctgccattctccaaattgcagttcgcgcttagctggataacgccacggaatgatgtcgtcgtgcacaacaatggtgacttctacagcgcggagaatctcgctctctccaggggaagccgaagtttccaaaaggtcgttgatcaaagctcgccgcgttgtttcatcaagccttacggtcaccgtaaccagcaaatcaatatcactgtgtggcttcaggccgccatccactgcggagccgtacaaatgtacggccagcaacgtcggttcgagatggcgctcgatgacgccaactacctctgatagttgagtcgatacttcggcgatcaccgcttccctcat

SEQ ID NO: 53 - DNA, 12163 bp, synthetic construct
  source 1..12163: mol_type = other DNA
tagtcatgccccgcgcccaccggaaggagctgactgggttgaaggctctcaagggcatcggtcgcacgcttgtgttgacagctagctcagtcctaggtataatactagtcacgtgaactgccgagtaggtagctgataacgagacctctgtcttgtcagctagggtggtctcgtgaactgccgagtaggtagctgataactcgagagatccggctgctaacaaacccgcttaaggaagatggccaacttatttacataaggctgctgccaccgctgagcaataactagcataaccccttggggcctctaaacgggtcttgaggggttttttggtttaaacccatctaattgggaattccccctgcctcgcgcgtttcggtgatgacggtgaaaacctctgacacagcgatcgcttatgacaacttgacggctacatcattcactttttcttcacaaccggcacggaactcgctcgggctggccccggtgcattttttaaatacccgcgagaaatagagttgatcgtcaaaaccaacattgcgaccgacggtggcgataggcatccgggtggtgctcaaaagcagcttcgcctggctgatacgttggtcctcgcgccagcttaagacgctaatccctaactgctggcggaaaagatgtgacagacgcgacggcgacaagcaaacatgctgtgcgacgctggcgatatcaaaattgctgtctgccaggtgatcgctgatgtactgacaagcctcgcgtacccgattatccatcggtggatggagcgactcgttaatcgcttccatgcgccgcagtaacaattgctcaagcagatttatcgccagcagctccgaatagcgcccttccccttgcccggcgttaatgatttgcccaaacaggtcgctgaaatgcggctggtgcgcttcatccgggcgaaagaaccccgtattggcaaatattgacggccagttaagccattcatgccagtaggcgcgcggacgaaagtaaacccactggtgataccattcgcgagcctccggatgacgaccgtagtgatgaatctctcctggcgggaacagcaaaatatcacccggtcggcaaacaaattctcgtccctgatttttcaccaccccctgaccgcgaatggtgagattgagaatataacctttcattcccagcggtcggtcgataaaaaaatcgagataaccgttggcctcaatcggcgttaaacccgccaccagatgggcattaaacgagtatcccggcagcaggggatcattttgcgcttcagccatacttttcatactcccgccattcagagaagaaaccaattgtccatattgcatcagacattgccgtcactgcgtcttttactggctcttctcgctaaccaaaccggtaaccccgcttattaaaagcattctgtaacaaagcgggaccaaagccatgacaaaaacgcgtaacaaaagtgtctataatcacggcagaaaagtccacattgattatttgcacggcgtcacactttgctatgccatagcatttttatccataagattagcggatcctacctgacgctttttatcgcaactctctactgtttctccatacccgggatccgaattcgagcgaaggagatatacatatgtttttgcaaagacctaaaccttacagcgatgaaagtttagaaagtttctttatccgagtggctaacaaaaatggctacggtgatgtccatcgcttcctagaagccactaaacgattccttcaagacattgaccataatggctatcaaacctttccgactgatataactcggataaacccatactcagctaaaaacagttccagcgcacgaactgcgtcattcctgaaacttgcacaattgacatttaatgaaccgccagagctacttgggttggcaattaacagaacaaacatgaaatactcgccgtcaactagcgcggttgttagaggtgcagaagtctttcctcgcagtttactacggacgcactccatcccctgctgtcctttgtgtctgcgagaaaatggctacgcctcctacctttggcactttcaggggtacgaatactgccacagccataacgtacctttaattaccacttgtagctgtggtaaggagtttgactaccgagtatctgggttaaagggcatttgctgcaaatgcaaggagcctatcaccttaaccagcagggagaacggtcatgaggcagcgtgtactgtttcaaactggcttgctggccatgaatctaaacctctgccaaatcttcctaaaagctaccgatggggtttagttcattggtggatgggtattaaagatagcgagttcgatcacttttcgttcgttcaatttttctcaaactggccaaggtcattccactcgataatcgaagatgaagtagagttcaaccttgagcatgctgttgtcagcacgtctgaattacgactaaaagatcttcttggtcgattgtttttcggttcaattcggttacctgagcggaatcttcaacacaatatcatccttggtgagcttctctgctatttagaaaatcgtttatggcaagacaagggattaatcgccaacctcaaaatgaacgcgttagaggcgactgtaatgttaaattgtagcctcgatcagattgcatcaatggttgaacaacgcatcttgaagccaaatcgaaaaagcaagcccaacagccctcttgatgttaccgattatctatttcatttcggcgatattttctgtctttggttagctgagttccaaagcgatgagtttaaccgttcgttttatgtgtcgaggtggtaaatgcaaactctgaaagaactaatcgcatccaatcctgacgacttaacaactgaacttaagagagcatttcgtccactcacaccgcatattgcaattgatggtaatgaacttgacgcactgacgatattagtcaatttaaccgataagactgatgatcagaaagacctgctcgatcgagccaaatgcaagcaaaaacttcgagatgaaaaatggtgggctagctgcataaattgcgttaattacagacaaagccataacccaaaattcccggatatacgttctgaaggcgtgattcgaacccaagccctgggtgaattaccgagtttcctactctcgtcctcaaaaatcccaccataccattggtcatatagccatgattcaaaatacgtcaacaaaagcgcattcctcaccaatgagttttgttgggatggtgagatctcatgtttgggtgagcttcttaaagatgcagatcacccactttggaatactttgaaaaagttaggttgttctcaaaaaacttgcaaagcaatggcaaaacaactagctgatattactctcacgactatcaatgtcacactcgcaccaaattacctgactcaaatatctctccccgatagtgatacatcctacatttcactctctcctgttgcatcgctatcgatgcaaagccactttcatcagaggctccaagatgaaaatcggcatagcgcgataacgcggtttagccgaactaccaacatgggggtcactgcgatgacatgtggcggcgcatttagaatgttaaagtctggcgctaagttttccagcccccctcatcaccgattaaacagtaaacgaagttggttgacgtcagagcatgttcagtcattaaaacagtaccagcgcctcaacaaaagcctcatacctgaaaactctcggattgcactccgtagaaaatacaaaatcgagcttcaaaatatggtcagatcttggtttgcaatgcaagaccatacccttgattcgaacatacttatccaacatttgaatcatgacctatcttacttaggagccacaaaacgttttgcatacgatccagcgatgaccaagctctttactgagcttttgaaacgagagttatcaaattcaatcaataatggtgagcaacacactaatggatcgtttttagtcctaccgaatatcagggtttgtggcgcaacagctttaagctccccggtaacggtggggattccatcacttacagctttctttggcttcgttcacgcatttgaacggaatataaatcgcaccacctcatcgtttcgtgttgaatcctttgcgatatgcgtccatcaactacatgtcgagaagcgaggtttgacagcagagtttgtggaaaaaggcgacgggactatatccgctcccgcgacccgggatgactggcagtgtgatgtcgtatttagccttattttgaacaccaactttgctcaacatattgaccaagatacgttagttacatcactaccaaagcgattggctcggggttcagcaaaaattgcgattgatgactttaaacatatcaactcattctcgacattagaaacagcgatcgaatctctgccaatagaagctggtaggtggttatcactttacgcacagtcaaacaataatctaagtgatctattagcagccatgacagaggaccatcagctcatggcaagctgcgtcggttaccacttgttagaagagcccaaagataaaccaaactccctcagaggttacaaacacgctatcgccgagtgcatcattggactcattaactcaatcacctttagctcagagactgatcccaacacaatcttttggtcgctaaagaactatcaaaactacctagtggtacagccaaggagtatcaacgatgaaactaccgacaaatctagcctatgagcgctctatcgacccatcagatgtctgtttttttgtcgtctggcccgatgatagaaaaacacctttaacctacaattctcgtactctgctcgggcaaatggaagcggcatcattagcctatgatgtctcaggtcaaccaataaaaagtgccaccgctgaggcgttagctcaagggaaccctcatcaagttgatttctgccacgttccatacggtgcgagtcatattgaatgcagtttctccgtctcgttttcttctgaactacgtcaaccatataagtgtaactcaagcaaagttaaacaaacgctagtgcaattagtcgagctctacgaaacgaaaatcggctggactgagctagcaacccgatatttgatgaacatttgcaacggtaaatggctgtggaaaaatacccgtaaagcctattgctggaacattgtacttacaccttggccttggaacggggaaaaggttggatttgaagatattcgtactaactacacctcacggcaagactttaaaaataataaaaattggtctgctatagttgaaatgatcaaaaccgcattttctagtactgatgggctggcgatatttgaagtcagggccaccttgcacttgccaacgaatgctatggtgcggccaagccaagttttcacagaaaaagaaagtggcagtaaaagtaaatctaaaactcaaaacagtcgagtttttcagagtacaactattgatggtgaacgatcgccaatactaggggcctttaaaacgggagcagctattgcaaccattgacgactggtatcctgaagccactgagccactaagggtcggacggtttggggttcatcgcgaagatgtcacttgctaccgtcatccgtctaccggaaaagattttttctcgatattacaacaagcagagcactatattgaagtgttgagcgccaacaaaactcccgctcaagaaactatcaacgacatgcactttttaatggctaacctgattaagggtgggatgttccagcataaaggagactgactgtgaaatggtattataagacaatcacctttctgccagagttgtgcaacaacgagtcactggctgcaaagtgtctccgcgttctgcatggatttaactatcagtatgagacacgaaatatcggcgtttcatttccgctttggtgtgatgcaacggttggaaaaaagatttcatttgtcagcaagaacaagatagaactcgacttactacttaaacaacactatttcgtccaaatggaacaacttcaatactttcatatatccaacactgttctcgtcccagaagattgtacatacgtttcctttagacgctgtcaatctatagataagctcacagcagcagggctggcaaggaaaatcagacgcctggagaaacgtgctctatctagaggcgagcaatttgacccatcatcttttgctcaaaaagagcatactgcaatagcgcactaccactcacttggggagtccagcaaacagacgaaccgcaactttcgactcaatatcaggatgctctcggagcaaccccgtgaggggaactcgatttttagtagctatggcttatcaaattcagaaaactcgtttcagcctgtacccttaatctgacctttaataaggagatataccatggcgacaagtttacctacgccctcagcaattacgacttcggcgttagagtatgcattccatactcccgctcgcaatctaacgaaatctcgcggaaaaaacattcatcgttatgtcagtgtaaagatgagtaagaggattacggtagaatctactctagagtgtgatgcctgctatcactttgattttgagccaagtattgttcgcttttgcgctcaaccgattcgatttttatattatctcaatggtcagtctcactcctatgttcctgactttctagttcaatttgataccaacgagtttgttctatatgaagtaaagtcagcttatgctaagaacaaacctgattttgatgttgaatgggaggcgaaagtaaaagcagcaactgaactagggctagaattggagcttgttgaagagagtgatattagggatacggttgtattaaataatcttaagcgcatgcatcgttatgcttcgaaagatgagctgaataacgtacataactctctcttaaaaataataaagtacaatggcgcccaatctgcaagatgcttgggagaacagttgggtttaaaaggccgaactgttttaccaattttgtgcgatttgctgtcaaggtgtttactcgatacacgtttggataagcctctatctcttgaatctcgatttgagttggccagttatggctaagaaagggttctcaagtttccatagaaaagcagtctcttcccaagatacgcttgaatcgatagagcttgtctctagcgctaattgtctagaaagtgttacgtatcaagatatatcagcatttcccgaaacaattgcggtagagattaatttccgattaagcattcttcgctttttagcgcgaaagtgcgaaaccattgtggccaaatcaattgaaccacatcgtgtagagctacagcaaaactatagtagaaaaatacccagtgcaataacgatatatcgatggtggcttgcttttcgaaaatcagactacaaccccattagcttagcacctaatatcaaggatagaggtaatagagagacaaaagtgtcaacagttgttgattctattatggaacaggcagttgaaagagttatatctggacgaaaagtcaatgttagctctgcatataaacgtgttcgacgaaaagttcgtcaatacaatctaactcatggaacgaaatacacgtatcctaagtacgaatctgtaagaaagcgagtaaaaaagaaaaccccatttgagttattagccgcagggaaaggggagagagtagctaagagagagtttcgccgaatgggaaaaaagatcctcacgtctagcgtgctagagagggttgaaatagatcacactgtcgttgacctttttgcagtacacgaagagtatcgaatcccattgggccgaccttggcttactcaattggttgattgttacagtaaagctgtaatcggtttttatttaggtttcgagcctcctagctatgtgtcggtttcccttgcacttaagaatgcaatacaacgcaaagatgacttaatctcctcgtatgaatcgatcgagaatgaatggctatgttatggcatcccagacctactcgtaactgataatggtaaagagtttttgtcgaaagcatttgatcaagcatgtgaatcactattgatcaatgtgcatcaaaataaagttgagacgcccgacaacaaacctcatgttgaacgtaactacgggactattaatacttctctgttagacgatttacctgggaaatccttcagccagtaccttcaaagagaagggtacgactctgtgggagaagctacccttacactcaatgagattagagaaatttacttaatttggttggtggatatttatcataaaaaacccaatcagagaggcactaattgtcctaatgttgcgtggaaaaagggttgtcaagaatgggaaccagaggagttctctggttctaaagacgaattagactttaaatttgctattgttgattacaaacaacttactaaagtagggataactgtctacaaagaactgagttatagcaatgaccgtttagctgaatatagagggaagaaaggaaaccataaagttcagttcaagtataaccctgagtgtatggcagttatttgggtgttggatgaggatatgaatgagtactttacagttaatgcgattgactacgaatatgcaagtagagtatcactttggcaacataaatataacatgaaatatcaagcagaactaaattcagcagaatatgatgaggacaaggaaattgatgcagaaataaaaattgaagaaatcgcagatcgttcaattgttaagactaacaaaatcagagctcggaggcgtggcgctaggcatcaagagaatagcgcaagggctaagtcaatcagtaatgcgaacccggcctcgatacaaaaacatgaagatgaaatcgttagtgcagataatgacgattgggatattgattatgtctgagaaatcgtcaaatgagtgaaacgcgtgaggctcgtatatcaagagctaaaagggcatttgtatccacaccgagcgttaggaaaatcttgagttacatggatagatgtagagatctatcagacctagagtctgagcctacatgcatgatggtctatggtgcttcgggtgtaggtaaaacgaccgtcatcaagaaatacttaaatcaaaacagaagagagtccgaagccgggggcgatataataccggttttgcatattgagttgccagacaatgcgaagccagtagatgcagcaagggaattgctggttgaaatgggtgacccgctagcactttatgaaactgacttagctagattgacgaaaagactgactgaattaatccctgcggtcggcgtgaagctgattattatcgatgagttccaacatttggtggaagaaaggtcaaatcgggttcttacccaagtaggtaattggctaaaaatgatacttaacaaaacgaaatgtccaattgttatatttggtatgccatactcaaaagttgtactgcaagcaaactcgcaacttcacgggcgattttccattcaggttgaactgcgcccctttagctaccagggaggtagaggtgtatttaaaacttttttggaataccttgataaagccctaccttttgaaaaacaggctggcttagccaacgaaagtttgcagaaaaaattgtatgcattctctcagggaaacatgcgttcgttgagaaaccttatttatcaagcatctatcgaagcaattgataatcagcatgagacgataaccgaagaagatttcgtttttgcatcgaagttgacatcgggcgataaacccaactcatggaaaaatccttttgaggagggtgttgaggtaacagaagatatgttacgaccgccaccaaaagatattggttgggaggactatttgagacattcaaccccgagagtgagtaaaccaggtagaaataaaaactttttcgaataacctaggctgctgcgctgctgccaccgctgagcaataactagcataaccccttggggcctctaaacgggtcttgaggggttttttgctgaaacctcaggcattgaacctgcacggtaccgagctcgaattcactggccgtcgttttacaacgtcgtgactgggaaaaccctggcgttacccaacttaatcgccttgctatcgtggccggatcttgcggcccctcggcttgaacgaattgttagacattattcctttgccctcggacgagtgctggggcgtcggtttccactatcggcaagtacttctacacagccatcggtccagacggccgcgcttctgcgggcgatttgtgtacgcccgacagtcccggctccggatcggacgattgcgtcgcatcgaccctgcgcccaagctgcatcatcgaaattgccgtcaaccaagctctgatagagttggtcaagaccaatgcggagcatatacgcccggagccgcggcgatcctgcaagctccggatgcctccgctcgaagtagcgcgtctgctgctccatacaagccaaccacggcctccagaagaagatgttggcgacctcgtattgggaatccccgaacatcgcctcgctccagtcaatgaccgctgttatgcggccattgtccgtcaggacattgttggagccgaaatccgcgtgcacgaggtgccggacttcggggcagtcctcggcccaaagcatcagctcatcgagagcctgcgcgacggacgcactgacggtgtcgtccatcacagtttgccagtgatacacatggggatcagcaatcgcgcatatgaaatcacgccatgtagtgtattgaccgattccttgcggtccgaatgggccgaacccgctcgtctggctaagatcggccgcagcgatcgcatccatggcctccgcgaccggctgcagaacagcgggcagttcggtttcaggcaggtcttgcaacgtgacaccctgtgcacggcgggagatgcaataggtcaggctctcgctgaattccccaatgtcaagcacttccggaatcgggagcgcggccgatgcaaagtgccgataaacataacgatctttgtagaaaccatcggcgcagctatttacccgcaggacatatccacgccctcctacatcgaagctgaaagcacgagattcttcgccctccgagagctgcatcaggtcggagacgctgtcgaacttttcgatcagaaacttctcgacagacgtcgcggtgagttcaggctttttcatgattgtcctccgattcaactcttcctttttcaatattattgaagcatttatcagggttattgtctcatgagcggatacatatttgaatgtatttagaaaaataaacaaatagctagctcactcggtcgctacgctccgggcgtgagactgcggcgggcgctgcggacacatacaaagttacccacagattccgtggataagcaggggactaacatgtgaggcaaaacagcagggccgcgccggtggcgtttttccataggctccgccctcctgccagagttcacataaacagacgcttttccggtgcatctgtgggagccgtgaggctcaaccatgaatctgacagtacgggcgaaacccgacaggacttaaagatccccaccgtttccggcgggtcgctccctcttgcgctctcctgttccgaccctgccgtttaccggatacctgttccgcctttctcccttacgggaagtgtggcgctttctcatagctcacacactggtatctcggctcggtgtaggtcgttcgctccaagctgggctgtaagcaagaactccccgttcagcccgactgctgcgccttatccggtaactgttcacttgagtccaacccggaaaagcacggtaaaacgccactggcagcagccattggtaactgggagttcgcagaggatttgtttagctaaacacgcggttgctcttgaagtgtgcgccaaagtccggctacactggaaggacagatttggttgctgtgctctgcgaaagccagttaccacggttaagcagttccccaactgacttaaccttcgatcaaaccacctccccaggtggttttttcgtttacagggcaaaagattacgcgcagaaaaaaaggatctcaagaagatcctttgatcttttctactgaaccgctctagatttcagtgcaatttatctcttcaaatgtagcacctgaagtcagccccatacgatataagttgtaattctcatgt

SEQ ID NO: 54 - DNA, 12163 bp, synthetic construct
  source 1..12163: mol_type = other DNA
tagtcatgccccgcgcccaccggaaggagctgactgggttgaaggctctcaagggcatcggtcgcacgcttgtgttgacagctagctcagtcctaggtataatactagtcacgtgaactgccgagtaggtagctgataacaccagacccgcgagcattaattcttgcctccagtgaactgccgagtaggtagctgataactcgagagatccggctgctaacaaacccgcttaaggaagatggccaacttatttacataaggctgctgccaccgctgagcaataactagcataaccccttggggcctctaaacgggtcttgaggggttttttggtttaaacccatctaattgggaattccccctgcctcgcgcgtttcggtgatgacggtgaaaacctctgacacagcgatcgcttatgacaacttgacggctacatcattcactttttcttcacaaccggcacggaactcgctcgggctggccccggtgcattttttaaatacccgcgagaaatagagttgatcgtcaaaaccaacattgcgaccgacggtggcgataggcatccgggtggtgctcaaaagcagcttcgcctggctgatacgttggtcctcgcgccagcttaagacgctaatccctaactgctggcggaaaagatgtgacagacgcgacggcgacaagcaaacatgctgtgcgacgctggcgatatcaaaattgctgtctgccaggtgatcgctgatgtactgacaagcctcgcgtacccgattatccatcggtggatggagcgactcgttaatcgcttccatgcgccgcagtaacaattgctcaagcagatttatcgccagcagctccgaatagcgcccttccccttgcccggcgttaatgatttgcccaaacaggtcgctgaaatgcggctggtgcgcttcatccgggcgaaagaaccccgtattggcaaatattgacggccagttaagccattcatgccagtaggcgcgcggacgaaagtaaacccactggtgataccattcgcgagcctccggatgacgaccgtagtgatgaatctctcctggcgggaacagcaaaatatcacccggtcggcaaacaaattctcgtccctgatttttcaccaccccctgaccgcgaatggtgagattgagaatataacctttcattcccagcggtcggtcgataaaaaaatcgagataaccgttggcctcaatcggcgttaaacccgccaccagatgggcattaaacgagtatcccggcagcaggggatcattttgcgcttcagccatacttttcatactcccgccattcagagaagaaaccaattgtccatattgcatcagacattgccgtcactgcgtcttttactggctcttctcgctaaccaaaccggtaaccccgcttattaaaagcattctgtaacaaagcgggaccaaagccatgacaaaaacgcgtaacaaaagtgtctataatcacggcagaaaagtccacattgattatttgcacggcgtcacactttgctatgccatagcatttttatccataagattagcggatcctacctgacgctttttatcgcaactctctactgtttctccatacccgggatccgaattcgagcgaaggagatatacatatgtttttgcaaagacctaaaccttacagcgatgaaagtttagaaagtttctttatccgagtggctaacaaaaatggctacggtgatgtccatcgcttcctagaagccactaaacgattccttcaagacattgaccataatggctatcaaacctttccgactgatataactcggataaacccatactcagctaaaaacagttccagcgcacgaactgcgtcattcctgaaacttgcacaattgacatttaatgaaccgccagagctacttgggttggcaattaacagaacaaacatgaaatactcgccgtcaactagcgcggttgttagaggtgcagaagtctttcctcgcagtttactacggacgcactccatcccctgctgtcctttgtgtctgcgagaaaatggctacgcctcctacctttggcactttcaggggtacgaatactgccacagccataacgtacctttaattaccacttgtagctgtggtaaggagtttgactaccgagtatctgggttaaagggcatttgctgcaaatgcaaggagcctatcaccttaaccagcagggagaacggtcatgaggcagcgtgtactgtttcaaactggcttgctggccatgaatctaaacctctgccaaatcttcctaaaagctaccgatggggtttagttcattggtggatgggtattaaagatagcgagttcgatcacttttcgttcgttcaatttttctcaaactggccaaggtcattccactcgataatcgaagatgaagtagagttcaaccttgagcatgctgttgtcagcacgtctgaattacgactaaaagatcttcttggtcgattgtttttcggttcaattcggttacctgagcggaatcttcaacacaatatcatccttggtgagcttctctgctatttagaaaatcgtttatggcaagacaagggattaatcgccaacctcaaaatgaacgcgttagaggcgactgtaatgttaaattgtagcctcgatcagattgcatcaatggttgaacaacgcatcttgaagccaaatcgaaaaagcaagcccaacagccctcttgatgttaccgattatctatttcatttcggcgatattttctgtctttggttagctgagttccaaagcgatgagtttaaccgttcgttttatgtgtcgaggtggtaaatgcaaactctgaaagaactaatcgcatccaatcctgacgacttaacaactgaacttaagagagcatttcgtccactcacaccgcatattgcaattgatggtaatgaacttgacgcactgacgatattagtcaatttaaccgataagactgatgatcagaaagacctgctcgatcgagccaaatgcaagcaaaaacttcgagatgaaaaatggtgggctagctgcataaattgcgttaattacagacaaagccataacccaaaattcccggatatacgttctgaaggcgtgattcgaacccaagccctgggtgaattaccgagtttcctactctcgtcctcaaaaatcccaccataccattggtcatatagccatgattcaaaatacgtcaacaaaagcgcattcctcaccaatgagttttgttgggatggtgagatctcatgtttgggtgagcttcttaaagatgcagatcacccactttggaatactttgaaaaagttaggttgttctcaaaaaacttgcaaagcaatggcaaaacaactagctgatattactctcacgactatcaatgtcacactcgcaccaaattacctgactcaaatatctctccccgatagtgatacatcctacatttcactctctcctgttgcatcgctatcgatgcaaagccactttcatcagaggctccaagatgaaaatcggcatagcgcgataacgcggtttagccgaactaccaacatgggggtcactgcgatgacatgtggcggcgcatttagaatgttaaagtctggcgctaagttttccagcccccctcatcaccgattaaacagtaaacgaagttggttgacgtcagagcatgttcagtcattaaaacagtaccagcgcctcaacaaaagcctcatacctgaaaactctcggattgcactccgtagaaaatacaaaatcgagcttcaaaatatggtcagatcttggtttgcaatgcaagaccatacccttgattcgaacatacttatccaacatttgaatcatgacctatcttacttaggagccacaaaacgttttgcatacgatccagcgatgaccaagctctttactgagcttttgaaacgagagttatcaaattcaatcaataatggtgagcaacacactaatggatcgtttttagtcctaccgaatatcagggtttgtggcgcaacagctttaagctccccggtaacggtggggattccatcacttacagctttctttggcttcgttcacgcatttgaacggaatataaatcgcaccacctcatcgtttcgtgttgaatcctttgcgatatgcgtccatcaactacatgtcgagaagcgaggtttgacagcagagtttgtggaaaaaggcgacgggactatatccgctcccgcgacccgggatgactggcagtgtgatgtcgtatttagccttattttgaacaccaactttgctcaacatattgaccaagatacgttagttacatcactaccaaagcgattggctcggggttcagcaaaaattgcgattgatgactttaaacatatcaactcattctcgacattagaaacagcgatcgaatctctgccaatagaagctggtaggtggttatcactttacgcacagtcaaacaataatctaagtgatctattagcagccatgacagaggaccatcagctcatggcaagctgcgtcggttaccacttgttagaagagcccaaagataaaccaaactccctcagaggttacaaacacgctatcgccgagtgcatcattggactcattaactcaatcacctttagctcagagactgatcccaacacaatcttttggtcgctaaagaactatcaaaactacctagtggtacagccaaggagtatcaacgatgaaactaccgacaaatctagcctatgagcgctctatcgacccatcagatgtctgtttttttgtcgtctggcccgatgatagaaaaacacctttaacctacaattctcgtactctgctcgggcaaatggaagcggcatcattagcctatgatgtctcaggtcaaccaataaaaagtgccaccgctgaggcgttagctcaagggaaccctcatcaagttgatttctgccacgttccatacggtgcgagtcatattgaatgcagtttctccgtctcgttttcttctgaactacgtcaaccatataagtgtaactcaagcaaagttaaacaaacgctagtgcaattagtcgagctctacgaaacgaaaatcggctggactgagctagcaacccgatatttgatgaacatttgcaacggtaaatggctgtggaaaaatacccgtaaagcctattgctggaacattgtacttacaccttggccttggaacggggaaaaggttggatttgaagatattcgtactaactacacctcacggcaagactttaaaaataataaaaattggtctgctatagttgaaatgatcaaaaccgcattttctagtactgatgggctggcgatatttgaagtcagggccaccttgcacttgccaacgaatgctatggtgcggccaagccaagttttcacagaaaaagaaagtggcagtaaaagtaaatctaaaactcaaaacagtcgagtttttcagagtacaactattgatggtgaacgatcgccaatactaggggcctttaaaacgggagcagctattgcaaccattgacgactggtatcctgaagccactgagccactaagggtcggacggtttggggttcatcgcgaagatgtcacttgctaccgtcatccgtctaccggaaaagattttttctcgatattacaacaagcagagcactatattgaagtgttgagcgccaacaaaactcccgctcaagaaactatcaacgacatgcactttttaatggctaacctgattaagggtgggatgttccagcataaaggagactgactgtgaaatggtattataagacaatcacctttctgccagagttgtgcaacaacgagtcactggctgcaaagtgtctccgcgttctgcatggatttaactatcagtatgagacacgaaatatcggcgtttcatttccgctttggtgtgatgcaacggttggaaaaaagatttcatttgtcagcaagaacaagatagaactcgacttactacttaaacaacactatttcgtccaaatggaacaacttcaatactttcatatatccaacactgttctcgtcccagaagattgtacatacgtttcctttagacgctgtcaatctatagataagctcacagcagcagggctggcaaggaaaatcagacgcctggagaaacgtgctctatctagaggcgagcaatttgacccatcatcttttgctcaaaaagagcatactgcaatagcgcactaccactcacttggggagtccagcaaacagacgaaccgcaactttcgactcaatatcaggatgctctcggagcaaccccgtgaggggaactcgatttttagtagctatggcttatcaaattcagaaaactcgtttcagcctgtacccttaatctgacctttaataaggagatataccatggcgacaagtttacctacgccctcagcaattacgacttcggcgttagagtatgcattccatactcccgctcgcaatctaacgaaatctcgcggaaaaaacattcatcgttatgtcagtgtaaagatgagtaagaggattacggtagaatctactctagagtgtgatgcctgctatcactttgattttgagccaagtattgttcgcttttgcgctcaaccgattcgatttttatattatctcaatggtcagtctcactcctatgttcctgactttctagttcaatttgataccaacgagtttgttctatatgaagtaaagtcagcttatgctaagaacaaacctgattttgatgttgaatgggaggcgaaagtaaaagcagcaactgaactagggctagaattggagcttgttgaagagagtgatattagggatacggttgtattaaataatcttaagcgcatgcatcgttatgcttcgaaagatgagctgaataacgtacataactctctcttaaaaataataaagtacaatggcgcccaatctgcaagatgcttgggagaacagttgggtttaaaaggccgaactgttttaccaattttgtgcgatttgctgtcaaggtgtttactcgatacacgtttggataagcctctatctcttgaatctcgatttgagttggccagttatggctaagaaagggttctcaagtttccatagaaaagcagtctcttcccaagatacgcttgaatcgatagagcttgtctctagcgctaattgtctagaaagtgttacgtatcaagatatatcagcatttcccgaaacaattgcggtagagattaatttccgattaagcattcttcgctttttagcgcgaaagtgcgaaaccattgtggccaaatcaattgaaccacatcgtgtagagctacagcaaaactatagtagaaaaatacccagtgcaataacgatatatcgatggtggcttgcttttcgaaaatcagactacaaccccattagcttagcacctaatatcaaggatagaggtaatagagagacaaaagtgtcaacagttgttgattctattatggaacaggcagttgaaagagttatatctggacgaaaagtcaatgttagctctgcatataaacgtgttcgacgaaaagttcgtcaatacaatctaactcatggaacgaaatacacgtatcctaagtacgaatctgtaagaaagcgagtaaaaaagaaaaccccatttgagttattagccgcagggaaaggggagagagtagctaagagagagtttcgccgaatgggaaaaaagatcctcacgtctagcgtgctagagagggttgaaatagatcacactgtcgttgacctttttgcagtacacgaagagtatcgaatcccattgggccgaccttggcttactcaattggttgattgttacagtaaagctgtaatcggtttttatttaggtttcgagcctcctagctatgtgtcggtttcccttgcacttaagaatgcaatacaacgcaaagatgacttaatctcctcgtatgaatcgatcgagaatgaatggctatgttatggcatcccagacctactcgtaactgataatggtaaagagtttttgtcgaaagcatttgatcaagcatgtgaatcactattgatcaatgtgcatcaaaataaagttgagacgcccgacaacaaacctcatgttgaacgtaactacgggactattaatacttctctgttagacgatttacctgggaaatccttcagccagtaccttcaaagagaagggtacgactctgtgggagaagctacccttacactcaatgagattagagaaatttacttaatttggttggtggatatttatcataaaaaacccaatcagagaggcactaattgtcctaatgttgcgtggaaaaagggttgtcaagaatgggaaccagaggagttctctggttctaaagacgaattagactttaaatttgctattgttgattacaaacaacttactaaagtagggataactgtctacaaagaactgagttatagcaatgaccgtttagctgaatatagagggaagaaaggaaaccataaagttcagttcaagtataaccctgagtgtatggcagttatttgggtgttggatgaggatatgaatgagtactttacagttaatgcgattgactacgaatatgcaagtagagtatcactttggcaacataaatataacatgaaatatcaagcagaactaaattcagcagaatatgatgaggacaaggaaattgatgcagaaataaaaattgaagaaatcgcagatcgttcaattgttaagactaacaaaatcagagctcggaggcgtggcgctaggcatcaagagaatagcgcaagggctaagtcaatcagtaatgcgaacccggcctcgatacaaaaacatgaagatgaaatcgttagtgcagataatgacgattgggatattgattatgtctgagaaatcgtcaaatgagtgaaacgcgtgaggctcgtatatcaagagctaaaagggcatttgtatccacaccgagcgttaggaaaatcttgagttacatggatagatgtagagatctatcagacctagagtctgagcctacatgcatgatggtctatggtgcttcgggtgtaggtaaaacgaccgtcatcaagaaatacttaaatcaaaacagaagagagtccgaagccgggggcgatataataccggttttgcatattgagttgccagacaatgcgaagccagtagatgcagcaagggaattgctggttgaaatgggtgacccgctagcactttatgaaactgacttagctagattgacgaaaagactgactgaattaatccctgcggtcggcgtgaagctgattattatcgatgagttccaacatttggtggaagaaaggtcaaatcgggttcttacccaagtaggtaattggctaaaaatgatacttaacaaaacgaaatgtccaattgttatatttggtatgccatactcaaaagttgtactgcaagcaaactcgcaacttcacgggcgattttccattcaggttgaactgcgcccctttagctaccagggaggtagaggtgtatttaaaacttttttggaataccttgataaagccctaccttttgaaaaacaggctggcttagccaacgaaagtttgcagaaaaaattgtatgcattctctcagggaaacatgcgttcgttgagaaaccttatttatcaagcatctatcgaagcaattgataatcagcatgagacgataaccgaagaagatttcgtttttgcatcgaagttgacatcgggcgataaacccaactcatggaaaaatccttttgaggagggtgttgaggtaacagaagatatgttacgaccgccaccaaaagatattggttgggaggactatttgagacattcaaccccgagagtgagtaaaccaggtagaaataaaaactttttcgaataacctaggctgctgcgctgctgccaccgctgagcaataactagcataaccccttggggcctctaaacgggtcttgaggggttttttgctgaaacctcaggcattgaacctgcacggtaccgagctcgaattcactggccgtcgttttacaacgtcgtgactgggaaaaccctggcgttacccaacttaatcgccttgctatcgtggccggatcttgcggcccctcggcttgaacgaattgttagacattattcctttgccctcggacgagtgctggggcgtcggtttccactatcggcaagtacttctacacagccatcggtccagacggccgcgcttctgcgggcgatttgtgtacgcccgacagtcccggctccggatcggacgattgcgtcgcatcgaccctgcgcccaagctgcatcatcgaaattgccgtcaaccaagctctgatagagttggtcaagaccaatgcggagcatatacgcccggagccgcggcgatcctgcaagctccggatgcctccgctcgaagtagcgcgtctgctgctccatacaagccaaccacggcctccagaagaagatgttggcgacctcgtattgggaatccccgaacatcgcctcgctccagtcaatgaccgctgttatgcggccattgtccgtcaggacattgttggagccgaaatccgcgtgcacgaggtgccggacttcggggcagtcctcggcccaaagcatcagctcatcgagagcctgcgcgacggacgcactgacggtgtcgtccatcacagtttgccagtgatacacatggggatcagcaatcgcgcatatgaaatcacgccatgtagtgtattgaccgattccttgcggtccgaatgggccgaacccgctcgtctggctaagatcggccgcagcgatcgcatccatggcctccgcgaccggctgcagaacagcgggcagttcggtttcaggcaggtcttgcaacgtgacaccctgtgcacggcgggagatgcaataggtcaggctctcgctgaattccccaatgtcaagcacttccggaatcgggagcgcggccgatgcaaagtgccgataaacataacgatctttgtagaaaccatcggcgcagctatttacccgcaggacatatccacgccctcctacatcgaagctgaaagcacgagattcttcgccctccgagagctgcatcaggtcggagacgctgtcgaacttttcgatcagaaacttctcgacagacgtcgcggtgagttcaggctttttcatgattgtcctccgattcaactcttcctttttcaatattattgaagcatttatcagggttattgtctcatgagcggatacatatttgaatgtatttagaaaaataaacaaatagctagctcactcggtcgctacgctccgggcgtgagactgcggcgggcgctgcggacacatacaaagttacccacagattccgtggataagcaggggactaacatgtgaggcaaaacagcagggccgcgccggtggcgtttttccataggctccgccctcctgccagagttcacataaacagacgcttttccggtgcatctgtgggagccgtgaggctcaaccatgaatctgacagtacgggcgaaacccgacaggacttaaagatccccaccgtttccggcgggtcgctccctcttgcgctctcctgttccgaccctgccgtttaccggatacctgttccgcctttctcccttacgggaagtgtggcgctttctcatagctcacacactggtatctcggctcggtgtaggtcgttcgctccaagctgggctgtaagcaagaactccccgttcagcccgactgctgcgccttatccggtaactgttcacttgagtccaacccggaaaagcacggtaaaacgccactggcagcagccattggtaactgggagttcgcagaggatttgtttagctaaacacgcggttgctcttgaagtgtgcgccaaagtccggctacactggaaggacagatttggttgctgtgctctgcgaaagccagttaccacggttaagcagttccccaactgacttaaccttcgatcaaaccacctccccaggtggttttttcgtttacagggcaaaagattacgcgcagaaaaaaaggatctcaagaagatcctttgatcttttctactgaaccgctctagatttcagtgcaatttatctcttcaaatgtagcacctgaagtcagccccatacgatataagttgtaattctcatgt

SEQ ID NO: 55 - DNA, 12163 bp, synthetic construct
  source 1..12163: mol_type = other DNA
tagtcatgccccgcgcccaccggaaggagctgactgggttgaaggctctcaagggcatcggtcgcacgcttgtgttgacagctagctcagtcctaggtataatactagtcacgtgaactgccgagtaggtagctgataacttagcggaatgctggtacgggctgataaagaagtgaactgccgagtaggtagctgataactcgagagatccggctgctaacaaacccgcttaaggaagatggccaacttatttacataaggctgctgccaccgctgagcaataactagcataaccccttggggcctctaaacgggtcttgaggggttttttggtttaaacccatctaattgggaattccccctgcctcgcgcgtttcggtgatgacggtgaaaacctctgacacagcgatcgcttatgacaacttgacggctacatcattcactttttcttcacaaccggcacggaactcgctcgggctggccccggtgcattttttaaatacccgcgagaaatagagttgatcgtcaaaaccaacattgcgaccgacggtggcgataggcatccgggtggtgctcaaaagcagcttcgcctggctgatacgttggtcctcgcgccagcttaagacgctaatccctaactgctggcggaaaagatgtgacagacgcgacggcgacaagcaaacatgctgtgcgacgctggcgatatcaaaattgctgtctgccaggtgatcgctgatgtactgacaagcctcgcgtacccgattatccatcggtggatggagcgactcgttaatcgcttccatgcgccgcagtaacaattgctcaagcagatttatcgccagcagctccgaatagcgcccttccccttgcccggcgttaatgatttgcccaaacaggtcgctgaaatgcggctggtgcgcttcatccgggcgaaagaaccccgtattggcaaatattgacggccagttaagccattcatgccagtaggcgcgcggacgaaagtaaacccactggtgataccattcgcgagcctccggatgacgaccgtagtgatgaatctctcctggcgggaacagcaaaatatcacccggtcggcaaacaaattctcgtccctgatttttcaccaccccctgaccgcgaatggtgagattgagaatataacctttcattcccagcggtcggtcgataaaaaaatcgagataaccgttggcctcaatcggcgttaaacccgccaccagatgggcattaaacgagtatcccggcagcaggggatcattttgcgcttcagccatacttttcatactcccgccattcagagaagaaaccaattgtccatattgcatcagacattgccgtcactgcgtcttttactggctcttctcgctaaccaaaccggtaaccccgcttattaaaagcattctgtaacaaagcgggaccaaagccatgacaaaaacgcgtaacaaaagtgtctataatcacggcagaaaagtccacattgattatttgcacggcgtcacactttgctatgccatagcatttttatccataagattagcggatcctacctgacgctttttatcgcaactctctactgtttctccatacccgggatccgaattcgagcgaaggagatatacatatgtttttgcaaagacctaaaccttacagcgatgaaagtttagaaagtttctttatccgagtggctaacaaaaatggctacggtgatgtccatcgcttcctagaagccactaaacgattccttcaagacattgaccataatggctatcaaacctttccgactgatataactcggataaacccatactcagctaaaaacagttccagcgcacgaactgcgtcattcctgaaacttgcacaattgacatttaatgaaccgccagagctacttgggttggcaattaacagaacaaacatgaaatactcgccgtcaactagcgcggttgttagaggtgcagaagtctttcctcgcagtttactacggacgcactccatcccctgctgtcctttgtgtctgcgagaaaatggctacgcctcctacctttggcactttcaggggtacgaatactgccacagccataacgtacctttaattaccacttgtagctgtggtaaggagtttgactaccgagtatctgggttaaagggcatttgctgcaaatgcaaggagcctatcaccttaaccagcagggagaacggtcatgaggcagcgtgtactgtttcaaactggcttgctggccatgaatctaaacctctgccaaatcttcctaaaagctaccgatggggtttagttcattggtggatgggtattaaagatagcgagttcgatcacttttcgttcgttcaatttttctcaaactggccaaggtcattccactcgataatcgaagatgaagtagagttcaaccttgagcatgctgttgtcagcacgtctgaattacgactaaaagatcttcttggtcgattgtttttcggttcaattcggttacctgagcggaatcttcaacacaatatcatccttggtgagcttctctgctatttagaaaatcgtttatggcaagacaagggattaatcgccaacctcaaaatgaacgcgttagaggcgactgtaatgttaaattgtagcctcgatcagattgcatcaatggttgaacaacgcatcttgaagccaaatcgaaaaagcaagcccaacagccctcttgatgttaccgattatctatttcatttcggcgatattttctgtctttggttagctgagttccaaagcgatgagtttaaccgttcgttttatgtgtcgaggtggtaaatgcaaactctgaaagaactaatcgcatccaatcctgacgacttaacaactgaacttaagagagcatttcgtccactcacaccgcatattgcaattgatggtaatgaacttgacgcactgacgatattagtcaatttaaccgataagactgatgatcagaaagacctgctcgatcgagccaaatgcaagcaaaaacttcgagatgaaaaatggtgggctagctgcataaattgcgttaattacagacaaagccataacccaaaattcccggatatacgttctgaaggcgtgattcgaacccaagccctgggtgaattaccgagtttcctactctcgtcctcaaaaatcccaccataccattggtcatatagccatgattcaaaatacgtcaacaaaagcgcattcctcaccaatgagttttgttgggatggtgagatctcatgtttgggtgagcttcttaaagatgcagatcacccactttggaatactttgaaaaagttaggttgttctcaaaaaacttgcaaagcaatggcaaaacaactagctgatattactctcacgactatcaatgtcacactcgcaccaaattacctgactcaaatatctctccccgatagtgatacatcctacatttcactctctcctgttgcatcgctatcgatgcaaagccactttcatcagaggctccaagatgaaaatcggcatagcgcgataacgcggtttagccgaactaccaacatgggggtcactgcgatgacatgtggcggcgcatttagaatgttaaagtctggcgctaagttttccagcccccctcatcaccgattaaacagtaaacgaagttggttgacgtcagagcatgttcagtcattaaaacagtaccagcgcctcaacaaaagcctcatacctgaaaactctcggattgcactccgtagaaaatacaaaatcgagcttcaaaatatggtcagatcttggtttgcaatgcaagaccatacccttgattcgaacatacttatccaacatttgaatcatgacctatcttacttaggagccacaaaacgttttgcatacgatccagcgatgaccaagctctttactgagcttttgaaacgagagttatcaaattcaatcaataatggtgagcaacacactaatggatcgtttttagtcctaccgaatatcagggtttgtggcgcaacagctttaagctccccggtaacggtggggattccatcacttacagctttctttggcttcgttcacgcatttgaacggaatataaatcgcaccacctcatcgtttcgtgttgaatcctttgcgatatgcgtccatcaactacatgtcgagaagcgaggtttgacagcagagtttgtggaaaaaggcgacgggactatatccgctcccgcgacccgggatgactggcagtgtgatgtcgtatttagccttattttgaacaccaactttgctcaacatattgaccaagatacgttagttacatcactaccaaagcgattggctcggggttcagcaaaaattgcgattgatgactttaaacatatcaactcattctcgacattagaaacagcgatcgaatctctgccaatagaagctggtaggtggttatcactttacgcacagtcaaacaataatctaagtgatctattagcagccatgacagaggaccatcagctcatggcaagctgcgtcggttaccacttgttagaagagcccaaagataaaccaaactccctcagaggttacaaacacgctatcgccgagtgcatcattggactcattaactcaatcacctttagctcagagactgatcccaacacaatcttttggtcgctaaagaactatcaaaactacctagtggtacagccaaggagtatcaacgatgaaactaccgacaaatctagcctatgagcgctctatcgacccatcagatgtctgtttttttgtcgtctggcccgatgatagaaaaacacctttaacctacaattctcgtactctgctcgggcaaatggaagcggcatcattagcctatgatgtctcaggtcaaccaataaaaagtgccaccgctgaggcgttagctcaagggaaccctcatcaagttgatttctgccacgttccatacggtgcgagtcatattgaatgcagtttctccgtctcgttttcttctgaactacgtcaaccatataagtgtaactcaagcaaagttaaacaaacgctagtgcaattagtcgagctctacgaaacgaaaatcggctggactgagctagcaacccgatatttgatgaacatttgcaacggtaaatggctgtggaaaaatacccgtaaagcctattgctggaacattgtacttacaccttggccttggaacggggaaaaggttggatttgaagatattcgtactaactacacctcacggcaagactttaaaaataataaaaattggtctgctatagttgaaatgatcaaaaccgcattttctagtactgatgggctggcgatatttgaagtcagggccaccttgcacttgccaacgaatgctatggtgcggccaagccaagttttcacagaaaaagaaagtggcagtaaaagtaaatctaaaactcaaaacagtcgagtttttcagagtacaactattgatggtgaacgatcgccaatactaggggcctttaaaacgggagcagctattgcaaccattgacgactggtatcctgaagccactgagccactaagggtcggacggtttggggttcatcgcgaagatgtcacttgctaccgtcatccgtctaccggaaaagattttttctcgatattacaacaagcagagcactatattgaagtgttgagcgccaacaaaactcccgctcaagaaactatcaacgacatgcactttttaatggctaacctgattaagggtgggatgttccagcataaaggagactgactgtgaaatggtattataagacaatcacctttctgccagagttgtgcaacaacgagtcactggctgcaaagtgtctccgcgttctgcatggatttaactatcagtatgagacacgaaatatcggcgtttcatttccgctttggtgtgatgcaacggttggaaaaaagatttcatttgtcagcaagaacaagatagaactcgacttactacttaaacaacactatttcgtccaaatggaacaacttcaatactttcatatatccaacactgttctcgtcccagaagattgtacatacgtttcctttagacgctgtcaatctatagataagctcacagcagcagggctggcaaggaaaatcagacgcctggagaaacgtgctctatctagaggcgagcaatttgacccatcatcttttgctcaaaaagagcatactgcaatagcgcactaccactcacttggggagtccagcaaacagacgaaccgcaactttcgactcaatatcaggatgctctcggagcaaccccgtgaggggaactcgatttttagtagctatggcttatcaaattcagaaaactcgtttcagcctgtacccttaatctgacctttaataaggagatataccatggcgacaagtttacctacgccctcagcaattacgacttcggcgttagagtatgcattccatactcccgctcgcaatctaacgaaatctcgcggaaaaaacattcatcgttatgtcagtgtaaagatgagtaagaggattacggtagaatctactctagagtgtgatgcctgctatcactttgattttgagccaagtattgttcgcttttgcgctcaaccgattcgatttttatattatctcaatggtcagtctcactcctatgttcctgactttctagttcaatttgataccaacgagtttgttctatatgaagtaaagtcagcttatgctaagaacaaacctgattttgatgttgaatgggaggcgaaagtaaaagcagcaactgaactagggctagaattggagcttgttgaagagagtgatattagggatacggttgtattaaataatcttaagcgcatgcatcgttatgcttcgaaagatgagctgaataacgtacataactctctcttaaaaataataaagtacaatggcgcccaatctgcaagatgcttgggagaacagttgggtttaaaaggccgaactgttttaccaattttgtgcgatttgctgtcaaggtgtttactcgatacacgtttggataagcctctatctcttgaatctcgatttgagttggccagttatggctaagaaagggttctcaagtttccatagaaaagcagtctcttcccaagatacgcttgaatcgatagagcttgtctctagcgctaattgtctagaaagtgttacgtatcaagatatatcagcatttcccgaaacaattgcggtagagattaatttccgattaagcattcttcgctttttagcgcgaaagtgcgaaaccattgtggccaaatcaattgaaccacatcgtgtagagctacagcaaaactatagtagaaaaatacccagtgcaataacgatatatcgatggtggcttgcttttcgaaaatcagactacaaccccattagcttagcacctaatatcaaggatagaggtaatagagagacaaaagtgtcaacagttgttgattctattatggaacaggcagttgaaagagttatatctggacgaaaagtcaatgttagctctgcatataaacgtgttcgacgaaaagttcgtcaatacaatctaactcatggaacgaaatacacgtatcctaagtacgaatctgtaagaaagcgagtaaaaaagaaaaccccatttgagttattagccgcagggaaaggggagagagtagctaagagagagtttcgccgaatgggaaaaaagatcctcacgtctagcgtgctagagagggttgaaatagatcacactgtcgttgacctttttgcagtacacgaagagtatcgaatcccattgggccgaccttggcttactcaattggttgattgttacagtaaagctgtaatcggtttttatttaggtttcgagcctcctagctatgtgtcggtttcccttgcacttaagaatgcaatacaacgcaaagatgacttaatctcctcgtatgaatcgatcgagaatgaatggctatgttatggcatcccagacctactcgtaactgataatggtaaagagtttttgtcgaaagcatttgatcaagcatgtgaatcactattgatcaatgtgcatcaaaataaagttgagacgcccgacaacaaacctcatgttgaacgtaactacgggactattaatacttctctgttagacgatttacctgggaaatccttcagccagtaccttcaaagagaagggtacgactctgtgggagaagctacccttacactcaatgagattagagaaatttacttaatttggttggtggatatttatcataaaaaacccaatcagagaggcactaattgtcctaatgttgcgtggaaaaagggttgtcaagaatgggaaccagaggagttctctggttctaaagacgaattagactttaaatttgctattgttgattacaaacaacttactaaagtagggataactgtctacaaagaactgagttatagcaatgaccgtttagctgaatatagagggaagaaaggaaaccataaagttcagttcaagtataaccctgagtgtatggcagttatttgggtgttggatgaggatatgaatgagtactttacagttaatgcgattgactacgaatatgcaagtagagtatcactttggcaacataaatataacatgaaatatcaagcagaactaaattcagcagaatatgatgaggacaaggaaattgatgcagaaataaaaattgaagaaatcgcagatcgttcaattgttaagactaacaaaatcagagctcggaggcgtggcgctaggcatcaagagaatagcgcaagggctaagtcaatcagtaatgcgaacccggcctcgatacaaaaacatgaagatgaaatcgttagtgcagataatgacgattgggatattgattatgtctgagaaatcgtcaaatgagtgaaacgcgtgaggctcgtatatcaagagctaaaagggcatttgtatccacaccgagcgttaggaaaatcttgagttacatggatagatgtagagatctatcagacctagagtctgagcctacatgcatgatggtctatggtgcttcgggtgtaggtaaaacgaccgtcatcaagaaatacttaaatcaaaacagaagagagtccgaagccgggggcgatataataccggttttgcatattgagttgccagacaatgcgaagccagtagatgcagcaagggaattgctggttgaaatgggtgacccgctagcactttatgaaactgacttagctagattgacgaaaagactgactgaattaatccctgcggtcggcgtgaagctgattattatcgatgagttccaacatttggtggaagaaaggtcaaatcgggttcttacccaagtaggtaattggctaaaaatgatacttaacaaaacgaaatgtccaattgttatatttggtatgccatactcaaaagttgtactgcaagcaaactcgcaacttcacgggcgattttccattcaggttgaactgcgcccctttagctaccagggaggtagaggtgtatttaaaacttttttggaataccttgataaagccctaccttttgaaaaacaggctggcttagccaacgaaagtttgcagaaaaaattgtatgcattctctcagggaaacatgcgttcgttgagaaaccttatttatcaagcatctatcgaagcaattgataatcagcatgagacgataaccgaagaagatttcgtttttgcatcgaagttgacatcgggcgataaacccaactcatggaaaaatccttttgaggagggtgttgaggtaacagaagatatgttacgaccgccaccaaaagatattggttgggaggactatttgagacattcaaccccgagagtgagtaaaccaggtagaaataaaaactttttcgaataacctaggctgctgcgctgctgccaccgctgagcaataactagcataaccccttggggcctctaaacgggtcttgaggggttttttgctgaaacctcaggcattgaacctgcacggtaccgagctcgaattcactggccgtcgttttacaacgtcgtgactgggaaaaccctggcgttacccaacttaatcgccttgctatcgtggccggatcttgcggcccctcggcttgaacgaattgttagacattattcctttgccctcggacgagtgctggggcgtcggtttccactatcggcaagtacttctacacagccatcggtccagacggccgcgcttctgcgggcgatttgtgtacgcccgacagtcccggctccggatcggacgattgcgtcgcatcgaccctgcgcccaagctgcatcatcgaaattgccgtcaaccaagctctgatagagttggtcaagaccaatgcggagcatatacgcccggagccgcggcgatcctgcaagctccggatgcctccgctcgaagtagcgcgtctgctgctccatacaagccaaccacggcctccagaagaagatgttggcgacctcgtattgggaatccccgaacatcgcctcgctccagtcaatgaccgctgttatgcggccattgtccgtcaggacattgttggagccgaaatccgcgtgcacgaggtgccggacttcggggcagtcctcggcccaaagcatcagctcatcgagagcctgcgcgacggacgcactgacggtgtcgtccatcacagtttgccagtgatacacatggggatcagcaatcgcgcatatgaaatcacgccatgtagtgtattgaccgattccttgcggtccgaatgggccgaacccgctcgtctggctaagatcggccgcagcgatcgcatccatggcctccgcgaccggctgcagaacagcgggcagttcggtttcaggcaggtcttgcaacgtgacaccctgtgcacggcgggagatgcaataggtcaggctctcgctgaattccccaatgtcaagcacttccggaatcgggagcgcggccgatgcaaagtgccgataaacataacgatctttgtagaaaccatcggcgcagctatttacccgcaggacatatccacgccctcctacatcgaagctgaaagcacgagattcttcgccctccgagagctgcatcaggtcggagacgctgtcgaacttttcgatcagaaacttctcgacagacgtcgcggtgagttcaggctttttcatgattgtcctccgattcaactcttcctttttcaatattattgaagcatttatcagggttattgtctcatgagcggatacatatttgaatgtatttagaaaaataaacaaatagctagctcactcggtcgctacgctccgggcgtgagactgcggcgggcgctgcggacacatacaaagttacccacagattccgtggataagcaggggactaacatgtgaggcaaaacagcagggccgcgccggtggcgtttttccataggctccgccctcctgccagagttcacataaacagacgcttttccggtgcatctgtgggagccgtgaggctcaaccatgaatctgacagtacgggcgaaacccgacaggacttaaagatccccaccgtttccggcgggtcgctccctcttgcgctctcctgttccgaccctgccgtttaccggatacctgttccgcctttctcccttacgggaagtgtggcgctttctcatagctcacacactggtatctcggctcggtgtaggtcgttcgctccaagctgggctgtaagcaagaactccccgttcagcccgactgctgcgccttatccggtaactgttcacttgagtccaacccggaaaagcacggtaaaacgccactggcagcagccattggtaactgggagttcgcagaggatttgtttagctaaacacgcggttgctcttgaagtgtgcgccaaagtccggctacactggaaggacagatttggttgctgtgctctgcgaaagccagttaccacggttaagcagttccccaactgacttaaccttcgatcaaaccacctccccaggtggttttttcgtttacagggcaaaagattacgcgcagaaaaaaaggatctcaagaagatcctttgatcttttctactgaaccgctctagatttcagtgcaatttatctcttcaaatgtagcacctgaagtcagccccatacgatataagttgtaattctcatgt

SEQ ID NO: 56 - DNA, 12163 bp, synthetic construct
  source 1..12163: mol_type = other DNA
tagtcatgccccgcgcccaccggaaggagctgactgggttgaaggctctcaagggcatcggtcgcacgcttgtgttgacagctagctcagtcctaggtataatactagtcacgtgaactgccgagtaggtagctgataacagctgcaacaatgttgaaaatgccagccaactgtgaactgccgagtaggtagctgataactcgagagatccggctgctaacaaacccgcttaaggaagatggccaacttatttacataaggctgctgccaccgctgagcaataactagcataaccccttggggcctctaaacgggtcttgaggggttttttggtttaaacccatctaattgggaattccccctgcctcgcgcgtttcggtgatgacggtgaaaacctctgacacagcgatcgcttatgacaacttgacggctacatcattcactttttcttcacaaccggcacggaactcgctcgggctggccccggtgcattttttaaatacccgcgagaaatagagttgatcgtcaaaaccaacattgcgaccgacggtggcgataggcatccgggtggtgctcaaaagcagcttcgcctggctgatacgttggtcctcgcgccagcttaagacgctaatccctaactgctggcggaaaagatgtgacagacgcgacggcgacaagcaaacatgctgtgcgacgctggcgatatcaaaattgctgtctgccaggtgatcgctgatgtactgacaagcctcgcgtacccgattatccatcggtggatggagcgactcgttaatcgcttccatgcgccgcagtaacaattgctcaagcagatttatcgccagcagctccgaatagcgcccttccccttgcccggcgttaatgatttgcccaaacaggtcgctgaaatgcggctggtgcgcttcatccgggcgaaagaaccccgtattggcaaatattgacggccagttaagccattcatgccagtaggcgcgcggacgaaagtaaacccactggtgataccattcgcgagcctccggatgacgaccgtagtgatgaatctctcctggcgggaacagcaaaatatcacccggtcggcaaacaaattctcgtccctgatttttcaccaccccctgaccgcgaatggtgagattgagaatataacctttcattcccagcggtcggtcgataaaaaaatcgagataaccgttggcctcaatcggcgttaaacccgccaccagatgggcattaaacgagtatcccggcagcaggggatcattttgcgcttcagccatacttttcatactcccgccattcagagaagaaaccaattgtccatattgcatcagacattgccgtcactgcgtcttttactggctcttctcgctaaccaaaccggtaaccccgcttattaaaagcattctgtaacaaagcgggaccaaagccatgacaaaaacgcgtaacaaaagtgtctataatcacggcagaaaagtccacattgattatttgcacggcgtcacactttgctatgccatagcatttttatccataagattagcggatcctacctgacgctttttatcgcaactctctactgtttctccatacccgggatccgaattcgagcgaaggagatatacatatgtttttgcaaagacctaaaccttacagcgatgaaagtttagaaagtttctttatccgagtggctaacaaaaatggctacggtgatgtccatcgcttcctagaagccactaaacgattccttcaagacattgaccataatggctatcaaacctttccgactgatataactcggataaacccatactcagctaaaaacagttccagcgcacgaactgcgtcattcctgaaacttgcacaattgacatttaatgaaccgccagagctacttgggttggcaattaacagaacaaacatgaaatactcgccgtcaactagcgcggttgttagaggtgcagaagtctttcctcgcagtttactacggacgcactccatcccctgctgtcctttgtgtctgcgagaaaatggctacgcctcctacctttggcactttcaggggtacgaatactgccacagccataacgtacctttaattaccacttgtagctgtggtaaggagtttgactaccgagtatctgggttaaagggcatttgctgcaaatgcaaggagcctatcaccttaaccagcagggagaacggtcatgaggcagcgtgtactgtttcaaactggcttgctggccatgaatctaaacctctgccaaatcttcctaaaagctaccgatggggtttagttcattggtggatgggtattaaagatagcgagttcgatcacttttcgttcgttcaatttttctcaaactggccaaggtcattccactcgataatcgaagatgaagtagagttcaaccttgagcatgctgttgtcagcacgtctgaattacgactaaaagatcttcttggtcgattgtttttcggttcaattcggttacctgagcggaatcttcaacacaatatcatccttggtgagcttctctgctatttagaaaatcgtttatggcaagacaagggattaatcgccaacctcaaaatgaacgcgttagaggcgactgtaatgttaaattgtagcctcgatcagattgcatcaatggttgaacaacgcatcttgaagccaaatcgaaaaagcaagcccaacagccctcttgatgttaccgattatctatttcatttcggcgatattttctgtctttggttagctgagttccaaagcgatgagtttaaccgttcgttttatgtgtcgaggtggtaaatgcaaactctgaaagaactaatcgcatccaatcctgacgacttaacaactgaacttaagagagcatttcgtccactcacaccgcatattgcaattgatggtaatgaacttgacgcactgacgatattagtcaatttaaccgataagactgatgatcagaaagacctgctcgatcgagccaaatgcaagcaaaaacttcgagatgaaaaatggtgggctagctgcataaattgcgttaattacagacaaagccataacccaaaattcccggatatacgttctgaaggcgtgattcgaacccaagccctgggtgaattaccgagtttcctactctcgtcctcaaaaatcccaccataccattggtcatatagccatgattcaaaatacgtcaacaaaagcgcattcctcaccaatgagttttgttgggatggtgagatctcatgtttgggtgagcttcttaaagatgcagatcacccactttggaatactttgaaaaagttaggttgttctcaaaaaacttgcaaagcaatggcaaaacaactagctgatattactctcacgactatcaatgtcacactcgcaccaaattacctgactcaaatatctctccccgatagtgatacatcctacatttcactctctcctgttgcatcgctatcgatgcaaagccactttcatcagaggctccaagatgaaaatcggcatagcgcgataacgcggtttagccgaactaccaacatgggggtcactgcgatgacatgtggcggcgcatttagaatgttaaagtctggcgctaagttttccagcccccctcatcaccgattaaacagtaaacgaagttggttgacgtcagagcatgttcagtcattaaaacagtaccagcgcctcaacaaaagcctcatacctgaaaactctcggattgcactccgtagaaaatacaaaatcgagcttcaaaatatggtcagatcttggtttgcaatgcaagaccatacccttgattcgaacatacttatccaacatttgaatcatgacctatcttacttaggagccacaaaacgttttgcatacgatccagcgatgaccaagctctttactgagcttttgaaacgagagttatcaaattcaatcaataatggtgagcaacacactaatggatcgtttttagtcctaccgaatatcagggtttgtggcgcaacagctttaagctccccggtaacggtggggattccatcacttacagctttctttggcttcgttcacgcatttgaacggaatataaatcgcaccacctcatcgtttcgtgttgaatcctttgcgatatgcgtccatcaactacatgtcgagaagcgaggtttgacagcagagtttgtggaaaaaggcgacgggactatatccgctcccgcgacccgggatgactggcagtgtgatgtcgtatttagccttattttgaacaccaactttgctcaacatattgaccaagatacgttagttacatcactaccaaagcgattggctcggggttcagcaaaaattgcgattgatgactttaaacatatcaactcattctcgacattagaaacagcgatcgaatctctgccaatagaagctggtaggtggttatcactttacgcacagtcaaacaataatctaagtgatctattagcagccatgacagaggaccatcagctcatggcaagctgcgtcggttaccacttgttagaagagcccaaagataaaccaaactccctcagaggttacaaacacgctatcgccgagtgcatcattggactcattaactcaatcacctttagctcagagactgatcccaacacaatcttttggtcgctaaagaactatcaaaactacctagtggtacagccaaggagtatcaacgatgaaactaccgacaaatctagcctatgagcgctctatcgacccatcagatgtctgtttttttgtcgtctggcccgatgatagaaaaacacctttaacctacaattctcgtactctgctcgggcaaatggaagcggcatcattagcctatgatgtctcaggtcaaccaataaaaagtgccaccgctgaggcgttagctcaagggaaccctcatcaagttgatttctgccacgttccatacggtgcgagtcatattgaatgcagtttctccgtctcgttttcttctgaactacgtcaaccatataagtgtaactcaagcaaagttaaacaaacgctagtgcaattagtcgagctctacgaaacgaaaatcggctggactgagctagcaacccgatatttgatgaacatttgcaacggtaaatggctgtggaaaaatacccgtaaagcctattgctggaacattgtacttacaccttggccttggaacggggaaaaggttggatttgaagatattcgtactaactacacctcacggcaagactttaaaaataataaaaattggtctgctatagttgaaatgatcaaaaccgcattttctagtactgatgggctggcgatatttgaagtcagggccaccttgcacttgccaacgaatgctatggtgcggccaagccaagttttcacagaaaaagaaagtggcagtaaaagtaaatctaaaactcaaaacagtcgagtttttcagagtacaactattgatggtgaacgatcgccaatactaggggcctttaaaacgggagcagctattgcaaccattgacgactggtatcctgaagccactgagccactaagggtcggacggtttggggttcatcgcgaagatgtcacttgctaccgtcatccgtctaccggaaaagattttttctcgatattacaacaagcagagcactatattgaagtgttgagcgccaacaaaactcccgctcaagaaactatcaacgacatgcactttttaatggctaacctgattaagggtgggatgttccagcataaaggagactgactgtgaaatggtattataagacaatcacctttctgccagagttgtgcaacaacgagtcactggctgcaaagtgtctccgcgttctgcatggatttaactatcagtatgagacacgaaatatcggcgtttcatttccgctttggtgtgatgcaacggttggaaaaaagatttcatttgtcagcaagaacaagatagaactcgacttactacttaaacaacactatttcgtccaaatggaacaacttcaatactttcatatatccaacactgttctcgtcccagaagattgtacatacgtttcctttagacgctgtcaatctatagataagctcacagcagcagggctggcaaggaaaatcagacgcctggagaaacgtgctctatctagaggcgagcaatttgacccatcatcttttgctcaaaaagagcatactgcaatagcgcactaccactcacttggggagtccagcaaacagacgaaccgcaactttcgactcaatatcaggatgctctcggagcaaccccgtgaggggaactcgatttttagtagctatggcttatcaaattcagaaaactcgtttcagcctgtacccttaatctgacctttaataaggagatataccatggcgacaagtttacctacgccctcagcaattacgacttcggcgttagagtatgcattccatactcccgctcgcaatctaacgaaatctcgcggaaaaaacattcatcgttatgtcagtgtaaagatgagtaagaggattacggtagaatctactctagagtgtgatgcctgctatcactttgattttgagccaagtattgttcgcttttgcgctcaaccgattcgatttttatattatctcaatggtcagtctcactcctatgttcctgactttctagttcaatttgataccaacgagtttgttctatatgaagtaaagtcagcttatgctaagaacaaacctgattttgatgttgaatgggaggcgaaagtaaaagcagcaactgaactagggctagaattggagcttgttgaagagagtgatattagggatacggttgtattaaataatcttaagcgcatgcatcgttatgcttcgaaagatgagctgaataacgtacataactctctcttaaaaataataaagtacaatggcgcccaatctgcaagatgcttgggagaacagttgggtttaaaaggccgaactgttttaccaattttgtgcgatttgctgtcaaggtgtttactcgatacacgtttggataagcctctatctcttgaatctcgatttgagttggccagttatggctaagaaagggttctcaagtttccatagaaaagcagtctcttcccaagatacgcttgaatcgatagagcttgtctctagcgctaattgtctagaaagtgttacgtatcaagatatatcagcatttcccgaaacaattgcggtagagattaatttccgattaagcattcttcgctttttagcgcgaaagtgcgaaaccattgtggccaaatcaattgaaccacatcgtgtagagctacagcaaaactatagtagaaaaatacccagtgcaataacgatatatcgatggtggcttgcttttcgaaaatcagactacaaccccattagcttagcacctaatatcaaggatagaggtaatagagagacaaaagtgtcaacagttgttgattctattatggaacaggcagttgaaagagttatatctggacgaaaagtcaatgttagctctgcatataaacgtgttcgacgaaaagttcgtcaatacaatctaactcatggaacgaaatacacgtatcctaagtacgaatctgtaagaaagcgagtaaaaaagaaaaccccatttgagttattagccgcagggaaaggggagagagtagctaagagagagtttcgccgaatgggaaaaaagatcctcacgtctagcgtgctagagagggttgaaatagatcacactgtcgttgacctttttgcagtacacgaagagtatcgaatcccattgggccgaccttggcttactcaattggttgattgttacagtaaagctgtaatcggtttttatttaggtttcgagcctcctagctatgtgtcggtttcccttgcacttaagaatgcaatacaacgcaaagatgacttaatctcctcgtatgaatcgatcgagaatgaatggctatgttatggcatcccagacctactcgtaactgataatggtaaagagtttttgtcgaaagcatttgatcaagcatgtgaatcactattgatcaatgtgcatcaaaataaagttgagacgcccgacaacaaacctcatgttgaacgtaactacgggactattaatacttctctgttagacgatttacctgggaaatccttcagccagtaccttcaaagagaagggtacgactctgtgggagaagctacccttacactcaatgagattagagaaatttacttaatttggttggtggatatttatcataaaaaacccaatcagagaggcactaattgtcctaatgttgcgtggaaaaagggttgtcaagaatgggaaccagaggagttctctggttctaaagacgaattagactttaaatttgctattgttgattacaaacaacttactaaagtagggataactgtctacaaagaactgagttatagcaatgaccgtttagctgaatatagagggaagaaaggaaaccataaagttcagttcaagtataaccctgagtgtatggcagttatttgggtgttggatgaggatatgaatgagtactttacagttaatgcgattgactacgaatatgcaagtagagtatcactttggcaacataaatataacatgaaatatcaagcagaactaaattcagcagaatatgatgaggacaaggaaattgatgcagaaataaaaattgaagaaatcgcagatcgttcaattgttaagactaacaaaatcagagctcggaggcgtggcgctaggcatcaagagaatagcgcaagggctaagtcaatcagtaatgcgaacccggcctcgatacaaaaacatgaagatgaaatcgttagtgcagataatgacgattgggatattgattatgtctgagaaatcgtcaaatgagtgaaacgcgtgaggctcgtatatcaagagctaaaagggcatttgtatccacaccgagcgttaggaaaatcttgagttacatggatagatgtagagatctatcagacctagagtctgagcctacatgcatgatggtctatggtgcttcgggtgtaggtaaaacgaccgtcatcaagaaatacttaaatcaaaacagaagagagtccgaagccgggggcgatataataccggttttgcatattgagttgccagacaatgcgaagccagtagatgcagcaagggaattgctggttgaaatgggtgacccgctagcactttatgaaactgacttagctagattgacgaaaagactgactgaattaatccctgcggtcggcgtgaagctgattattatcgatgagttccaacatttggtggaagaaaggtcaaatcgggttcttacccaagtaggtaattggctaaaaatgatacttaacaaaacgaaatgtccaattgttatatttggtatgccatactcaaaagttgtactgcaagcaaactcgcaacttcacgggcgattttccattcaggttgaactgcgcccctttagctaccagggaggtagaggtgtatttaaaacttttttggaataccttgataaagccctaccttttgaaaaacaggctggcttagccaacgaaagtttgcagaaaaaattgtatgcattctctcagggaaacatgcgttcgttgagaaaccttatttatcaagcatctatcgaagcaattgataatcagcatgagacgataaccgaagaagatttcgtttttgcatcgaagttgacatcgggcgataaacccaactcatggaaaaatccttttgaggagggtgttgaggtaacagaagatatgttacgaccgccaccaaaagatattggttgggaggactatttgagacattcaaccccgagagtgagtaaaccaggtagaaataaaaactttttcgaataacctaggctgctgcgctgctgccaccgctgagcaataactagcataaccccttggggcctctaaacgggtcttgaggggttttttgctgaaacctcaggcattgaacctgcacggtaccgagctcgaattcactggccgtcgttttacaacgtcgtgactgggaaaaccctggcgttacccaacttaatcgccttgctatcgtggccggatcttgcggcccctcggcttgaacgaattgttagacattattcctttgccctcggacgagtgctggggcgtcggtttccactatcggcaagtacttctacacagccatcggtccagacggccgcgcttctgcgggcgatttgtgtacgcccgacagtcccggctccggatcggacgattgcgtcgcatcgaccctgcgcccaagctgcatcatcgaaattgccgtcaaccaagctctgatagagttggtcaagaccaatgcggagcatatacgcccggagccgcggcgatcctgcaagctccggatgcctccgctcgaagtagcgcgtctgctgctccatacaagccaaccacggcctccagaagaagatgttggcgacctcgtattgggaatccccgaacatcgcctcgctccagtcaatgaccgctgttatgcggccattgtccgtcaggacattgttggagccgaaatccgcgtgcacgaggtgccggacttcggggcagtcctcggcccaaagcatcagctcatcgagagcctgcgcgacggacgcactgacggtgtcgtccatcacagtttgccagtgatacacatggggatcagcaatcgcgcatatgaaatcacgccatgtagtgtattgaccgattccttgcggtccgaatgggccgaacccgctcgtctggctaagatcggccgcagcgatcgcatccatggcctccgcgaccggctgcagaacagcgggcagttcggtttcaggcaggtcttgcaacgtgacaccctgtgcacggcgggagatgcaataggtcaggctctcgctgaattccccaatgtcaagcacttccggaatcgggagcgcggccgatgcaaagtgccgataaacataacgatctttgtagaaaccatcggcgcagctatttacccgcaggacatatccacgccctcctacatcgaagctgaaagcacgagattcttcgccctccgagagctgcatcaggtcggagacgctgtcgaacttttcgatcagaaacttctcgacagacgtcgcggtgagttcaggctttttcatgattgtcctccgattcaactcttcctttttcaatattattgaagcatttatcagggttattgtctcatgagcggatacatatttgaatgtatttagaaaaataaacaaatagctagctcactcggtcgctacgctccgggcgtgagactgcggcgggcgctgcggacacatacaaagttacccacagattccgtggataagcaggggactaacatgtgaggcaaaacagcagggccgcgccggtggcgtttttccataggctccgccctcctgccagagttcacataaacagacgcttttccggtgcatctgtgggagccgtgaggctcaaccatgaatctgacagtacgggcgaaacccgacaggacttaaagatccccaccgtttccggcgggtcgctccctcttgcgctctcctgttccgaccctgccgtttaccggatacctgttccgcctttctcccttacgggaagtgtggcgctttctcatagctcacacactggtatctcggctcggtgtaggtcgttcgctccaagctgggctgtaagcaagaactccccgttcagcccgactgctgcgccttatccggtaactgttcacttgagtccaacccggaaaagcacggtaaaacgccactggcagcagccattggtaactgggagttcgcagaggatttgtttagctaaacacgcggttgctcttgaagtgtgcgccaaagtccggctacactggaaggacagatttggttgctgtgctctgcgaaagccagttaccacggttaagcagttccccaactgacttaaccttcgatcaaaccacctccccaggtggttttttcgtttacagggcaaaagattacgcgcagaaaaaaaggatctcaagaagatcctttgatcttttctactgaaccgctctagatttcagtgcaatttatctcttcaaatgtagcacctgaagtcagccccatacgatataagttgtaattctcatgt

SEQ ID NO: 57 - DNA, 12163 bp, synthetic construct
  source 1..12163: mol_type = other DNA
tagtcatgccccgcgcccaccggaaggagctgactgggttgaaggctctcaagggcatcggtcgcacgcttgtgttgacagctagctcagtcctaggtataatactagtcacgtgaactgccgagtaggtagctgataactggtggcggtggtgggagctattctcgttctggtgaactgccgagtaggtagctgataactcgagagatccggctgctaacaaacccgcttaaggaagatggccaacttatttacataaggctgctgccaccgctgagcaataactagcataaccccttggggcctctaaacgggtcttgaggggttttttggtttaaacccatctaattgggaattccccctgcctcgcgcgtttcggtgatgacggtgaaaacctctgacacagcgatcgcttatgacaacttgacggctacatcattcactttttcttcacaaccggcacggaactcgctcgggctggccccggtgcattttttaaatacccgcgagaaatagagttgatcgtcaaaaccaacattgcgaccgacggtggcgataggcatccgggtggtgctcaaaagcagcttcgcctggctgatacgttggtcctcgcgccagcttaagacgctaatccctaactgctggcggaaaagatgtgacagacgcgacggcgacaagcaaacatgctgtgcgacgctggcgatatcaaaattgctgtctgccaggtgatcgctgatgtactgacaagcctcgcgtacccgattatccatcggtggatggagcgactcgttaatcgcttccatgcgccgcagtaacaattgctcaagcagatttatcgccagcagctccgaatagcgcccttccccttgcccggcgttaatgatttgcccaaacaggtcgctgaaatgcggctggtgcgcttcatccgggcgaaagaaccccgtattggcaaatattgacggccagttaagccattcatgccagtaggcgcgcggacgaaagtaaacccactggtgataccattcgcgagcctccggatgacgaccgtagtgatgaatctctcctggcgggaacagcaaaatatcacccggtcggcaaacaaattctcgtccctgatttttcaccaccccctgaccgcgaatggtgagattgagaatataacctttcattcccagcggtcggtcgataaaaaaatcgagataaccgttggcctcaatcggcgttaaacccgccaccagatgggcattaaacgagtatcccggcagcaggggatcattttgcgcttcagccatacttttcatactcccgccattcagagaagaaaccaattgtccatattgcatcagacattgccgtcactgcgtcttttactggctcttctcgctaaccaaaccggtaaccccgcttattaaaagcattctgtaacaaagcgggaccaaagccatgacaaaaacgcgtaacaaaagtgtctataatcacggcagaaaagtccacattgattatttgcacggcgtcacactttgctatgccatagcatttttatccataagattagcggatcctacctgacgctttttatcgcaactctctactgtttctccatacccgggatccgaattcgagcgaaggagatatacatatgtttttgcaaagacctaaaccttacagcgatgaaagtttagaaagtttctttatccgagtggctaacaaaaatggctacggtgatgtccatcgcttcctagaagccactaaacgattccttcaagacattgaccataatggctatcaaacctttccgactgatataactcggataaacccatactcagctaaaaacagttccagcgcacgaactgcgtcattcctgaaacttgcacaattgacatttaatgaaccgccagagctacttgggttggcaattaacagaacaaacatgaaatactcgccgtcaactagcgcggttgttagaggtgcagaagtctttcctcgcagtttactacggacgcactccatcccctgctgtcctttgtgtctgcgagaaaatggctacgcctcctacctttggcactttcaggggtacgaatactgccacagccataacgtacctttaattaccacttgtagctgtggtaaggagtttgactaccgagtatctgggttaaagggcatttgctgcaaatgcaaggagcctatcaccttaaccagcagggagaacggtcatgaggcagcgtgtactgtttcaaactggcttgctggccatgaatctaaacctctgccaaatcttcctaaaagctaccgatggggtttagttcattggtggatgggtattaaagatagcgagttcgatcacttttcgttcgttcaatttttctcaaactggccaaggtcattccactcgataatcgaagatgaagtagagttcaaccttgagcatgctgttgtcagcacgtctgaattacgactaaaagatcttcttggtcgattgtttttcggttcaattcggttacctgagcggaatcttcaacacaatatcatccttggtgagcttctctgctatttagaaaatcgtttatggcaagacaagggattaatcgccaacctcaaaatgaacgcgttagaggcgactgtaatgttaaattgtagcctcgatcagattgcatcaatggttgaacaacgcatcttgaagccaaatcgaaaaagcaagcccaacagccctcttgatgttaccgattatctatttcatttcggcgatattttctgtctttggttagctgagttccaaagcgatgagtttaaccgttcgttttatgtgtcgaggtggtaaatgcaaactctgaaagaactaatcgcatccaatcctgacgacttaacaactgaacttaagagagcatttcgtccactcacaccgcatattgcaattgatggtaatgaacttgacgcactgacgatattagtcaatttaaccgataagactgatgatcagaaagacctgctcgatcgagccaaatgcaagcaaaaacttcgagatgaaaaatggtgggctagctgcataaattgcgttaattacagacaaagccataacccaaaattcccggatatacgttctgaaggcgtgattcgaacccaagccctgggtgaattaccgagtttcctactctcgtcctcaaaaatcccaccataccattggtcatatagccatgattcaaaatacgtcaacaaaagcgcattcctcaccaatgagttttgttgggatggtgagatctcatgtttgggtgagcttcttaaagatgcagatcacccactttggaatactttgaaaaagttaggttgttctcaaaaaacttgcaaagcaatggcaaaacaactagctgatattactctcacgactatcaatgtcacactcgcaccaaattacctgactcaaatatctctccccgatagtgatacatcctacatttcactctctcctgttgcatcgctatcgatgcaaagccactttcatcagaggctccaagatgaaaatcggcatagcgcgataacgcggtttagccgaactaccaacatgggggtcactgcgatgacatgtggcggcgcatttagaatgttaaagtctggcgctaagttttccagcccccctcatcaccgattaaacagtaaacgaagttggttgacgtcagagcatgttcagtcattaaaacagtaccagcgcctcaacaaaagcctcatacctgaaaactctcggattgcactccgtagaaaatacaaaatcgagcttcaaaatatggtcagatcttggtttgcaatgcaagaccatacccttgattcgaacatacttatccaacatttgaatcatgacctatcttacttaggagccacaaaacgttttgcatacgatccagcgatgaccaagctctttactgagcttttgaaacgagagttatcaaattcaatcaataatggtgagcaacacactaatggatcgtttttagtcctaccgaatatcagggtttgtggcgcaacagctttaagctccccggtaacggtggggattccatcacttacagctttctttggcttcgttcacgcatttgaacggaatataaatcgcaccacctcatcgtttcgtgttgaatcctttgcgatatgcgtccatcaactacatgtcgagaagcgaggtttgacagcagagtttgtggaaaaaggcgacgggactatatccgctcccgcgacccgggatgactggcagtgtgatgtcgtatttagccttattttgaacaccaactttgctcaacatattgaccaagatacgttagttacatcactaccaaagcgattggctcggggttcagcaaaaattgcgattgatgactttaaacatatcaactcattctcgacattagaaacagcgatcgaatctctgccaatagaagctggtaggtggttatcactttacgcacagtcaaacaataatctaagtgatctattagcagccatgacagaggaccatcagctcatggcaagctgcgtcggttaccacttgttagaagagcccaaagataaaccaaactccctcagaggttacaaacacgctatcgccgagtgcatcattggactcattaactcaatcacctttagctcagagactgatcccaacacaatcttttggtcgctaaagaactatcaaaactacctagtggtacagccaaggagtatcaacgatgaaactaccgacaaatctagcctatgagcgctctatcgacccatcagatgtctgtttttttgtcgtctggcccgatgatagaaaaacacctttaacctacaattctcgtactctgctcgggcaaatggaagcggcatcattagcctatgatgtctcaggtcaaccaataaaaagtgccaccgctgaggcgttagctcaagggaaccctcatcaagttgatttctgccacgttccatacggtgcgagtcatattgaatgcagtttctccgtctcgttttcttctgaactacgtcaaccatataagtgtaactcaagcaaagttaaacaaacgctagtgcaattagtcgagctctacgaaacgaaaatcggctggactgagctagcaacccgatatttgatgaacatttgcaacggtaaatggctgtggaaaaatacccgtaaagcctattgctggaacattgtacttacaccttggccttggaacggggaaaaggttggatttgaagatattcgtactaactacacctcacggcaagactttaaaaataataaaaattggtctgctatagttgaaatgatcaaaaccgcattttctagtactgatgggctggcgatatttgaagtcagggccaccttgcacttgccaacgaatgctatggtgcggccaagccaagttttcacagaaaaagaaagtggcagtaaaagtaaatctaaaactcaaaacagtcgagtttttcagagtacaactattgatggtgaacgatcgccaatactaggggcctttaaaacgggagcagctattgcaaccattgacgactggtatcctgaagccactgagccactaagggtcggacggtttggggttcatcgcgaagatgtcacttgctaccgtcatccgtctaccggaaaagattttttctcgatattacaacaagcagagcactatattgaagtgttgagcgccaacaaaactcccgctcaagaaactatcaacgacatgcactttttaatggctaacctgattaagggtgggatgttccagcataaaggagactgactgtgaaatggtattataagacaatcacctttctgccagagttgtgcaacaacgagtcactggctgcaaagtgtctccgcgttctgcatggatttaactatcagtatgagacacgaaatatcggcgtttcatttccgctttggtgtgatgcaacggttggaaaaaagatttcatttgtcagcaagaacaagatagaactcgacttactacttaaacaacactatttcgtccaaatggaacaacttcaatactttcatatatccaacactgttctcgtcccagaagattgtacatacgtttcctttagacgctgtcaatctatagataagctcacagcagcagggctggcaaggaaaatcagacgcctggagaaacgtgctctatctagaggcgagcaatttgacccatcatcttttgctcaaaaagagcatactgcaatagcgcactaccactcacttggggagtccagcaaacagacgaaccgcaactttcgactcaatatcaggatgctctcggagcaaccccgtgaggggaactcgatttttagtagctatggcttatcaaattcagaaaactcgtttcagcctgtacccttaatctgacctttaataaggagatataccatggcgacaagtttacctacgccctcagcaattacgacttcggcgttagagtatgcattccatactcccgctcgcaatctaacgaaatctcgcggaaaaaacattcatcgttatgtcagtgtaaagatgagtaagaggattacggtagaatctactctagagtgtgatgcctgctatcactttgattttgagccaagtattgttcgcttttgcgctcaaccgattcgatttttatattatctcaatggtcagtctcactcctatgttcctgactttctagttcaatttgataccaacgagtttgttctatatgaagtaaagtcagcttatgctaagaacaaacctgattttgatgttgaatgggaggcgaaagtaaaagcagcaactgaactagggctagaattggagcttgttgaagagagtgatattagggatacggttgtattaaataatcttaagcgcatgcatcgttatgcttcgaaagatgagctgaataacgtacataactctctcttaaaaataataaagtacaatggcgcccaatctgcaagatgcttgggagaacagttgggtttaaaaggccgaactgttttaccaattttgtgcgatttgctgtcaaggtgtttactcgatacacgtttggataagcctctatctcttgaatctcgatttgagttggccagttatggctaagaaagggttctcaagtttccatagaaaagcagtctcttcccaagatacgcttgaatcgatagagcttgtctctagcgctaattgtctagaaagtgttacgtatcaagatatatcagcatttcccgaaacaattgcggtagagattaatttccgattaagcattcttcgctttttagcgcgaaagtgcgaaaccattgtggccaaatcaattgaaccacatcgtgtagagctacagcaaaactatagtagaaaaatacccagtgcaataacgatatatcgatggtggcttgcttttcgaaaatcagactacaaccccattagcttagcacctaatatcaaggatagaggtaatagagagacaaaagtgtcaacagttgttgattctattatggaacaggcagttgaaagagttatatctggacgaaaagtcaatgttagctctgcatataaacgtgttcgacgaaaagttcgtcaatacaatctaactcatggaacgaaatacacgtatcctaagtacgaatctgtaagaaagcgagtaaaaaagaaaaccccatttgagttattagccgcagggaaaggggagagagtagctaagagagagtttcgccgaatgggaaaaaagatcctcacgtctagcgtgctagagagggttgaaatagatcacactgtcgttgacctttttgcagtacacgaagagtatcgaatcccattgggccgaccttggcttactcaattggttgattgttacagtaaagctgtaatcggtttttatttaggtttcgagcctcctagctatgtgtcggtttcccttgcacttaagaatgcaatacaacgcaaagatgacttaatctcctcgtatgaatcgatcgagaatgaatggctatgttatggcatcccagacctactcgtaactgataatggtaaagagtttttgtcgaaagcatttgatcaagcatgtgaatcactattgatcaatgtgcatcaaaataaagttgagacgcccgacaacaaacctcatgttgaacgtaactacgggactattaatacttctctgttagacgatttacctgggaaatccttcagccagtaccttcaaagagaagggtacgactctgtgggagaagctacccttacactcaatgagattagagaaatttacttaatttggttggtggatatttatcataaaaaacccaatcagagaggcactaattgtcctaatgttgcgtggaaaaagggttgtcaagaatgggaaccagaggagttctctggttctaaagacgaattagactttaaatttgctattgttgattacaaacaacttactaaagtagggataactgtctacaaagaactgagttatagcaatgaccgtttagctgaatatagagggaagaaaggaaaccataaagttcagttcaagtataaccctgagtgtatggcagttatttgggtgttggatgaggatatgaatgagtactttacagttaatgcgattgactacgaatatgcaagtagagtatcactttggcaacataaatataacatgaaatatcaagcagaactaaattcagcagaatatgatgaggacaaggaaattgatgcagaaataaaaattgaagaaatcgcagatcgttcaattgttaagactaacaaaatcagagctcggaggcgtggcgctaggcatcaagagaatagcgcaagggctaagtcaatcagtaatgcgaacccggcctcgatacaaaaacatgaagatgaaatcgttagtgcagataatgacgattgggatattgattatgtctgagaaatcgtcaaatgagtgaaacgcgtgaggctcgtatatcaagagctaaaagggcatttgtatccacaccgagcgttaggaaaatcttgagttacatggatagatgtagagatctatcagacctagagtctgagcctacatgcatgatggtctatggtgcttcgggtgtaggtaaaacgaccgtcatcaagaaatacttaaatcaaaacagaagagagtccgaagccgggggcgatataataccggttttgcatattgagttgccagacaatgcgaagccagtagatgcagcaagggaattgctggttgaaatgggtgacccgctagcactttatgaaactgacttagctagattgacgaaaagactgactgaattaatccctgcggtcggcgtgaagctgattattatcgatgagttccaacatttggtggaagaaaggtcaaatcgggttcttacccaagtaggtaattggctaaaaatgatacttaacaaaacgaaatgtccaattgttatatttggtatgccatactcaaaagttgtactgcaagcaaactcgcaacttcacgggcgattttccattcaggttgaactgcgcccctttagctaccagggaggtagaggtgtatttaaaacttttttggaataccttgataaagccctaccttttgaaaaacaggctggcttagccaacgaaagtttgcagaaaaaattgtatgcattctctcagggaaacatgcgttcgttgagaaaccttatttatcaagcatctatcgaagcaattgataatcagcatgagacgataaccgaagaagatttcgtttttgcatcgaagttgacatcgggcgataaacccaactcatggaaaaatccttttgaggagggtgttgaggtaacagaagatatgttacgaccgccaccaaaagatattggttgggaggactatttgagacattcaaccccgagagtgagtaaaccaggtagaaataaaaactttttcgaataacctaggctgctgcgctgctgccaccgctgagcaataactagcataaccccttggggcctctaaacgggtcttgaggggttttttgctgaaacctcaggcattgaacctgcacggtaccgagctcgaattcactggccgtcgttttacaacgtcgtgactgggaaaaccctggcgttacccaacttaatcgccttgctatcgtggccggatcttgcggcccctcggcttgaacgaattgttagacattattcctttgccctcggacgagtgctggggcgtcggtttccactatcggcaagtacttctacacagccatcggtccagacggccgcgcttctgcgggcgatttgtgtacgcccgacagtcccggctccggatcggacgattgcgtcgcatcgaccctgcgcccaagctgcatcatcgaaattgccgtcaaccaagctctgatagagttggtcaagaccaatgcggagcatatacgcccggagccgcggcgatcctgcaagctccggatgcctccgctcgaagtagcgcgtctgctgctccatacaagccaaccacggcctccagaagaagatgttggcgacctcgtattgggaatccccgaacatcgcctcgctccagtcaatgaccgctgttatgcggccattgtccgtcaggacattgttggagccgaaatccgcgtgcacgaggtgccggacttcggggcagtcctcggcccaaagcatcagctcatcgagagcctgcgcgacggacgcactgacggtgtcgtccatcacagtttgccagtgatacacatggggatcagcaatcgcgcatatgaaatcacgccatgtagtgtattgaccgattccttgcggtccgaatgggccgaacccgctcgtctggctaagatcggccgcagcgatcgcatccatggcctccgcgaccggctgcagaacagcgggcagttcggtttcaggcaggtcttgcaacgtgacaccctgtgcacggcgggagatgcaataggtcaggctctcgctgaattccccaatgtcaagcacttccggaatcgggagcgcggccgatgcaaagtgccgataaacataacgatctttgtagaaaccatcggcgcagctatttacccgcaggacatatccacgccctcctacatcgaagctgaaagcacgagattcttcgccctccgagagctgcatcaggtcggagacgctgtcgaacttttcgatcagaaacttctcgacagacgtcgcggtgagttcaggctttttcatgattgtcctccgattcaactcttcctttttcaatattattgaagcatttatcagggttattgtctcatgagcggatacatatttgaatgtatttagaaaaataaacaaatagctagctcactcggtcgctacgctccgggcgtgagactgcggcgggcgctgcggacacatacaaagttacccacagattccgtggataagcaggggactaacatgtgaggcaaaacagcagggccgcgccggtggcgtttttccataggctccgccctcctgccagagttcacataaacagacgcttttccggtgcatctgtgggagccgtgaggctcaaccatgaatctgacagtacgggcgaaacccgacaggacttaaagatccccaccgtttccggcgggtcgctccctcttgcgctctcctgttccgaccctgccgtttaccggatacctgttccgcctttctcccttacgggaagtgtggcgctttctcatagctcacacactggtatctcggctcggtgtaggtcgttcgctccaagctgggctgtaagcaagaactccccgttcagcccgactgctgcgccttatccggtaactgttcacttgagtccaacccggaaaagcacggtaaaacgccactggcagcagccattggtaactgggagttcgcagaggatttgtttagctaaacacgcggttgctcttgaagtgtgcgccaaagtccggctacactggaaggacagatttggttgctgtgctctgcgaaagccagttaccacggttaagcagttccccaactgacttaaccttcgatcaaaccacctccccaggtggttttttcgtttacagggcaaaagattacgcgcagaaaaaaaggatctcaagaagatcctttgatcttttctactgaaccgctctagatttcagtgcaatttatctcttcaaatgtagcacctgaagtcagccccatacgatataagttgtaattctcatgt

SEQ ID NO: 58 - DNA, 12163 bp, synthetic construct
  source 1..12163: mol_type = other DNA
tagtcatgccccgcgcccaccggaaggagctgactgggttgaaggctctcaagggcatcggtcgcacgcttgtgttgacagctagctcagtcctaggtataatactagtcacgtgaactgccgagtaggtagctgataacgaaaacacctgatatgaaaggcaatgccaccagtgaactgccgagtaggtagctgataactcgagagatccggctgctaacaaacccgcttaaggaagatggccaacttatttacataaggctgctgccaccgctgagcaataactagcataaccccttggggcctctaaacgggtcttgaggggttttttggtttaaacccatctaattgggaattccccctgcctcgcgcgtttcggtgatgacggtgaaaacctctgacacagcgatcgcttatgacaacttgacggctacatcattcactttttcttcacaaccggcacggaactcgctcgggctggccccggtgcattttttaaatacccgcgagaaatagagttgatcgtcaaaaccaacattgcgaccgacggtggcgataggcatccgggtggtgctcaaaagcagcttcgcctggctgatacgttggtcctcgcgccagcttaagacgctaatccctaactgctggcggaaaagatgtgacagacgcgacggcgacaagcaaacatgctgtgcgacgctggcgatatcaaaattgctgtctgccaggtgatcgctgatgtactgacaagcctcgcgtacccgattatccatcggtggatggagcgactcgttaatcgcttccatgcgccgcagtaacaattgctcaagcagatttatcgccagcagctccgaatagcgcccttccccttgcccggcgttaatgatttgcccaaacaggtcgctgaaatgcggctggtgcgcttcatccgggcgaaagaaccccgtattggcaaatattgacggccagttaagccattcatgccagtaggcgcgcggacgaaagtaaacccactggtgataccattcgcgagcctccggatgacgaccgtagtgatgaatctctcctggcgggaacagcaaaatatcacccggtcggcaaacaaattctcgtccctgatttttcaccaccccctgaccgcgaatggtgagattgagaatataacctttcattcccagcggtcggtcgataaaaaaatcgagataaccgttggcctcaatcggcgttaaacccgccaccagatgggcattaaacgagtatcccggcagcaggggatcattttgcgcttcagccatacttttcatactcccgccattcagagaagaaaccaattgtccatattgcatcagacattgccgtcactgcgtcttttactggctcttctcgctaaccaaaccggtaaccccgcttattaaaagcattctgtaacaaagcgggaccaaagccatgacaaaaacgcgtaacaaaagtgtctataatcacggcagaaaagtccacattgattatttgcacggcgtcacactttgctatgccatagcatttttatccataagattagcggatcctacctgacgctttttatcgcaactctctactgtttctccatacccgggatccgaattcgagcgaaggagatatacatatgtttttgcaaagacctaaaccttacagcgatgaaagtttagaaagtttctttatccgagtggctaacaaaaatggctacggtgatgtccatcgcttcctagaagccactaaacgattccttcaagacattgaccataatggctatcaaacctttccgactgatataactcggataaacccatactcagctaaaaacagttccagcgcacgaactgcgtcattcctgaaacttgcacaattgacatttaatgaaccgccagagctacttgggttggcaattaacagaacaaacatgaaatactcgccgtcaactagcgcggttgttagaggtgcagaagtctttcctcgcagtttactacggacgcactccatcccctgctgtcctttgtgtctgcgagaaaatggctacgcctcctacctttggcactttcaggggtacgaatactgccacagccataacgtacctttaattaccacttgtagctgtggtaaggagtttgactaccgagtatctgggttaaagggcatttgctgcaaatgcaaggagcctatcaccttaaccagcagggagaacggtcatgaggcagcgtgtactgtttcaaactggcttgctggccatgaatctaaacctctgccaaatcttcctaaaagctaccgatggggtttagttcattggtggatgggtattaaagatagcgagttcgatcacttttcgttcgttcaatttttctcaaactggccaaggtcattccactcgataatcgaagatgaagtagagttcaaccttgagcatgctgttgtcagcacgtctgaattacgactaaaagatcttcttggtcgattgtttttcggttcaattcggttacctgagcggaatcttcaacacaatatcatccttggtgagcttctctgctatttagaaaatcgtttatggcaagacaagggattaatcgccaacctcaaaatgaacgcgttagaggcgactgtaatgttaaattgtagcctcgatcagattgcatcaatggttgaacaacgcatcttgaagccaaatcgaaaaagcaagcccaacagccctcttgatgttaccgattatctatttcatttcggcgatattttctgtctttggttagctgagttccaaagcgatgagtttaaccgttcgttttatgtgtcgaggtggtaaatgcaaactctgaaagaactaatcgcatccaatcctgacgacttaacaactgaacttaagagagcatttcgtccactcacaccgcatattgcaattgatggtaatgaacttgacgcactgacgatattagtcaatttaaccgataagactgatgatcagaaagacctgctcgatcgagccaaatgcaagcaaaaacttcgagatgaaaaatggtgggctagctgcataaattgcgttaattacagacaaagccataacccaaaattcccggatatacgttctgaaggcgtgattcgaacccaagccctgggtgaattaccgagtttcctactctcgtcctcaaaaatcccaccataccattggtcatatagccatgattcaaaatacgtcaacaaaagcgcattcctcaccaatgagttttgttgggatggtgagatctcatgtttgggtgagcttcttaaagatgcagatcacccactttggaatactttgaaaaagttaggttgttctcaaaaaacttgcaaagcaatggcaaaacaactagctgatattactctcacgactatcaatgtcacactcgcaccaaattacctgactcaaatatctctccccgatagtgatacatcctacatttcactctctcctgttgcatcgctatcgatgcaaagccactttcatcagaggctccaagatgaaaatcggcatagcgcgataacgcggtttagccgaactaccaacatgggggtcactgcgatgacatgtggcggcgcatttagaatgttaaagtctggcgctaagttttccagcccccctcatcaccgattaaacagtaaacgaagttggttgacgtcagagcatgttcagtcattaaaacagtaccagcgcctcaacaaaagcctcatacctgaaaactctcggattgcactccgtagaaaatacaaaatcgagcttcaaaatatggtcagatcttggtttgcaatgcaagaccatacccttgattcgaacatacttatccaacatttgaatcatgacctatcttacttaggagccacaaaacgttttgcatacgatccagcgatgaccaagctctttactgagcttttgaaacgagagttatcaaattcaatcaataatggtgagcaacacactaatggatcgtttttagtcctaccgaatatcagggtttgtggcgcaacagctttaagctccccggtaacggtggggattccatcacttacagctttctttggcttcgttcacgcatttgaacggaatataaatcgcaccacctcatcgtttcgtgttgaatcctttgcgatatgcgtccatcaactacatgtcgagaagcgaggtttgacagcagagtttgtggaaaaaggcgacgggactatatccgctcccgcgacccgggatgactggcagtgtgatgtcgtatttagccttattttgaacaccaactttgctcaacatattgaccaagatacgttagttacatcactaccaaagcgattggctcggggttcagcaaaaattgcgattgatgactttaaacatatcaactcattctcgacattagaaacagcgatcgaatctctgccaatagaagctggtaggtggttatcactttacgcacagtcaaacaataatctaagtgatctattagcagccatgacagaggaccatcagctcatggcaagctgcgtcggttaccacttgttagaagagcccaaagataaaccaaactccctcagaggttacaaacacgctatcgccgagtgcatcattggactcattaactcaatcacctttagctcagagactgatcccaacacaatcttttggtcgctaaagaactatcaaaactacctagtggtacagccaaggagtatcaacgatgaaactaccgacaaatctagcctatgagcgctctatcgacccatcagatgtctgtttttttgtcgtctggcccgatgatagaaaaacacctttaacctacaattctcgtactctgctcgggcaaatggaagcggcatcattagcctatgatgtctcaggtcaaccaataaaaagtgccaccgctgaggcgttagctcaagggaaccctcatcaagttgatttctgccacgttccatacggtgcgagtcatattgaatgcagtttctccgtctcgttttcttctgaactacgtcaaccatataagtgtaactcaagcaaagttaaacaaacgctagtgcaattagtcgagctctacgaaacgaaaatcggctggactgagctagcaacccgatatttgatgaacatttgcaacggtaaatggctgtggaaaaatacccgtaaagcctattgctggaacattgtacttacaccttggccttggaacggggaaaaggttggatttgaagatattcgtactaactacacctcacggcaagactttaaaaataataaaaattggtctgctatagttgaaatgatcaaaaccgcattttctagtactgatgggctggcgatatttgaagtcagggccaccttgcacttgccaacgaatgctatggtgcggccaagccaagttttcacagaaaaagaaagtggcagtaaaagtaaatctaaaactcaaaacagtcgagtttttcagagtacaactattgatggtgaacgatcgccaatactaggggcctttaaaacgggagcagctattgcaaccattgacgactggtatcctgaagccactgagccactaagggtcggacggtttggggttcatcgcgaagatgtcacttgctaccgtcatccgtctaccggaaaagattttttctcgatattacaacaagcagagcactatattgaagtgttgagcgccaacaaaactcccgctcaagaaactatcaacgacatgcactttttaatggctaacctgattaagggtgggatgttccagcataaaggagactgactgtgaaatggtattataagacaatcacctttctgccagagttgtgcaacaacgagtcactggctgcaaagtgtctccgcgttctgcatggatttaactatcagtatgagacacgaaatatcggcgtttcatttccgctttggtgtgatgcaacggttggaaaaaagatttcatttgtcagcaagaacaagatagaactcgacttactacttaaacaacactatttcgtccaaatggaacaacttcaatactttcatatatccaacactgttctcgtcccagaagattgtacatacgtttcctttagacgctgtcaatctatagataagctcacagcagcagggctggcaaggaaaatcagacgcctggagaaacgtgctctatctagaggcgagcaatttgacccatcatcttttgctcaaaaagagcatactgcaatagcgcactaccactcacttggggagtccagcaaacagacgaaccgcaactttcgactcaatatcaggatgctctcggagcaaccccgtgaggggaactcgatttttagtagctatggcttatcaaattcagaaaactcgtttcagcctgtacccttaatctgacctttaataaggagatataccatggcgacaagtttacctacgccctcagcaattacgacttcggcgttagagtatgcattccatactcccgctcgcaatctaacgaaatctcgcggaaaaaacattcatcgttatgtcagtgtaaagatgagtaagaggattacggtagaatctactctagagtgtgatgcctgctatcactttgattttgagccaagtattgttcgcttttgcgctcaaccgattcgatttttatattatctcaatggtcagtctcactcctatgttcctgactttctagttcaatttgataccaacgagtttgttctatatgaagtaaagtcagcttatgctaagaacaaacctgattttgatgttgaatgggaggcgaaagtaaaagcagcaactgaactagggctagaattggagcttgttgaagagagtgatattagggatacggttgtattaaataatcttaagcgcatgcatcgttatgcttcgaaagatgagctgaataacgtacataactctctcttaaaaataataaagtacaatggcgcccaatctgcaagatgcttgggagaacagttgggtttaaaaggccgaactgttttaccaattttgtgcgatttgctgtcaaggtgtttactcgatacacgtttggataagcctctatctcttgaatctcgatttgagttggccagttatggctaagaaagggttctcaagtttccatagaaaagcagtctcttcccaagatacgcttgaatcgatagagcttgtctctagcgctaattgtctagaaagtgttacgtatcaagatatatcagcatttcccgaaacaattgcggtagagattaatttccgattaagcattcttcgctttttagcgcgaaagtgcgaaaccattgtggccaaatcaattgaaccacatcgtgtagagctacagcaaaactatagtagaaaaatacccagtgcaataacgatatatcgatggtggcttgcttttcgaaaatcagactacaaccccattagcttagcacctaatatcaaggatagaggtaatagagagacaaaagtgtcaacagttgttgattctattatggaacaggcagttgaaagagttatatctggacgaaaagtcaatgttagctctgcatataaacgtgttcgacgaaaagttcgtcaatacaatctaactcatggaacgaaatacacgtatcctaagtacgaatctgtaagaaagcgagtaaaaaagaaaaccccatttgagttattagccgcagggaaaggggagagagtagctaagagagagtttcgccgaatgggaaaaaagatcctcacgtctagcgtgctagagagggttgaaatagatcacactgtcgttgacctttttgcagtacacgaagagtatcgaatcccattgggccgaccttggcttactcaattggttgattgttacagtaaagctgtaatcggtttttatttaggtttcgagcctcctagctatgtgtcggtttcccttgcacttaagaatgcaatacaacgcaaagatgacttaatctcctcgtatgaatcgatcgagaatgaatggctatgttatggcatcccagacctactcgtaactgataatggtaaagagtttttgtcgaaagcatttgatcaagcatgtgaatcactattgatcaatgtgcatcaaaataaagttgagacgcccgacaacaaacctcatgttgaacgtaactacgggactattaatacttctctgttagacgatttacctgggaaatccttcagccagtaccttcaaagagaagggtacgactctgtgggagaagctacccttacactcaatgagattagagaaatttacttaatttggttggtggatatttatcataaaaaacccaatcagagaggcactaattgtcctaatgttgcgtggaaaaagggttgtcaagaatgggaaccagaggagttctctggttctaaagacgaattagactttaaatttgctattgttgattacaaacaacttactaaagtagggataactgtctacaaagaactgagttatagcaatgaccgtttagctgaatatagagggaagaaaggaaaccataaagttcagttcaagtataaccctgagtgtatggcagttatttgggtgttggatgaggatatgaatgagtactttacagttaatgcgattgactacgaatatgcaagtagagtatcactttggcaacataaatataacatgaaatatcaagcagaactaaattcagcagaatatgatgaggacaaggaaattgatgcagaaataaaaattgaagaaatcgcagatcgttcaattgttaagactaacaaaatcagagctcggaggcgtggcgctaggcatcaagagaatagcgcaagggctaagtcaatcagtaatgcgaacccggcctcgatacaaaaacatgaagatgaaatcgttagtgcagataatgacgattgggatattgattatgtctgagaaatcgtcaaatgagtgaaacgcgtgaggctcgtatatcaagagctaaaagggcatttgtatccacaccgagcgttaggaaaatcttgagttacatggatagatgtagagatctatcagacctagagtctgagcctacatgcatgatggtctatggtgcttcgggtgtaggtaaaacgaccgtcatcaagaaatacttaaatcaaaacagaagagagtccgaagccgggggcgatataataccggttttgcatattgagttgccagacaatgcgaagccagtagatgcagcaagggaattgctggttgaaatgggtgacccgctagcactttatgaaactgacttagctagattgacgaaaagactgactgaattaatccctgcggtcggcgtgaagctgattattatcgatgagttccaacatttggtggaagaaaggtcaaatcgggttcttacccaagtaggtaattggctaaaaatgatacttaacaaaacgaaatgtccaattgttatatttggtatgccatactcaaaagttgtactgcaagcaaactcgcaacttcacgggcgattttccattcaggttgaactgcgcccctttagctaccagggaggtagaggtgtatttaaaacttttttggaataccttgataaagccctaccttttgaaaaacaggctggcttagccaacgaaagtttgcagaaaaaattgtatgcattctctcagggaaacatgcgttcgttgagaaaccttatttatcaagcatctatcgaagcaattgataatcagcatgagacgataaccgaagaagatttcgtttttgcatcgaagttgacatcgggcgataaacccaactcatggaaaaatccttttgaggagggtgttgaggtaacagaagatatgttacgaccgccaccaaaagatattggttgggaggactatttgagacattcaaccccgagagtgagtaaaccaggtagaaataaaaactttttcgaataacctaggctgctgcgctgctgccaccgctgagcaataactagcataaccccttggggcctctaaacgggtcttgaggggttttttgctgaaacctcaggcattgaacctgcacggtaccgagctcgaattcactggccgtcgttttacaacgtcgtgactgggaaaaccctggcgttacccaacttaatcgccttgctatcgtggccggatcttgcggcccctcggcttgaacgaattgttagacattattcctttgccctcggacgagtgctggggcgtcggtttccactatcggcaagtacttctacacagccatcggtccagacggccgcgcttctgcgggcgatttgtgtacgcccgacagtcccggctccggatcggacgattgcgtcgcatcgaccctgcgcccaagctgcatcatcgaaattgccgtcaaccaagctctgatagagttggtcaagaccaatgcggagcatatacgcccggagccgcggcgatcctgcaagctccggatgcctccgctcgaagtagcgcgtctgctgctccatacaagccaaccacggcctccagaagaagatgttggcgacctcgtattgggaatccccgaacatcgcctcgctccagtcaatgaccgctgttatgcggccattgtccgtcaggacattgttggagccgaaatccgcgtgcacgaggtgccggacttcggggcagtcctcggcccaaagcatcagctcatcgagagcctgcgcgacggacgcactgacggtgtcgtccatcacagtttgccagtgatacacatggggatcagcaatcgcgcatatgaaatcacgccatgtagtgtattgaccgattccttgcggtccgaatgggccgaacccgctcgtctggctaagatcggccgcagcgatcgcatccatggcctccgcgaccggctgcagaacagcgggcagttcggtttcaggcaggtcttgcaacgtgacaccctgtgcacggcgggagatgcaataggtcaggctctcgctgaattccccaatgtcaagcacttccggaatcgggagcgcggccgatgcaaagtgccgataaacataacgatctttgtagaaaccatcggcgcagctatttacccgcaggacatatccacgccctcctacatcgaagctgaaagcacgagattcttcgccctccgagagctgcatcaggtcggagacgctgtcgaacttttcgatcagaaacttctcgacagacgtcgcggtgagttcaggctttttcatgattgtcctccgattcaactcttcctttttcaatattattgaagcatttatcagggttattgtctcatgagcggatacatatttgaatgtatttagaaaaataaacaaatagctagctcactcggtcgctacgctccgggcgtgagactgcggcgggcgctgcggacacatacaaagttacccacagattccgtggataagcaggggactaacatgtgaggcaaaacagcagggccgcgccggtggcgtttttccataggctccgccctcctgccagagttcacataaacagacgcttttccggtgcatctgtgggagccgtgaggctcaaccatgaatctgacagtacgggcgaaacccgacaggacttaaagatccccaccgtttccggcgggtcgctccctcttgcgctctcctgttccgaccctgccgtttaccggatacctgttccgcctttctcccttacgggaagtgtggcgctttctcatagctcacacactggtatctcggctcggtgtaggtcgttcgctccaagctgggctgtaagcaagaactccccgttcagcccgactgctgcgccttatccggtaactgttcacttgagtccaacccggaaaagcacggtaaaacgccactggcagcagccattggtaactgggagttcgcagaggatttgtttagctaaacacgcggttgctcttgaagtgtgcgccaaagtccggctacactggaaggacagatttggttgctgtgctctgcgaaagccagttaccacggttaagcagttccccaactgacttaaccttcgatcaaaccacctccccaggtggttttttcgtttacagggcaaaagattacgcgcagaaaaaaaggatctcaagaagatcctttgatcttttctactgaaccgctctagatttcagtgcaatttatctcttcaaatgtagcacctgaagtcagccccatacgatataagttgtaattctcatgt

SEQ ID NO: 59 - DNA, 12163 bp, synthetic construct
  source 1..12163: mol_type = other DNA
tagtcatgccccgcgcccaccggaaggagctgactgggttgaaggctctcaagggcatcggtcgcacgcttgtgttgacagctagctcagtcctaggtataatactagtcacgtgaactgccgagtaggtagctgataacttgttaatgagcatgacaatcatgaccgccaagtgaactgccgagtaggtagctgataactcgagagatccggctgctaacaaacccgcttaaggaagatggccaacttatttacataaggctgctgccaccgctgagcaataactagcataaccccttggggcctctaaacgggtcttgaggggttttttggtttaaacccatctaattgggaattccccctgcctcgcgcgtttcggtgatgacggtgaaaacctctgacacagcgatcgcttatgacaacttgacggctacatcattcactttttcttcacaaccggcacggaactcgctcgggctggccccggtgcattttttaaatacccgcgagaaatagagttgatcgtcaaaaccaacattgcgaccgacggtggcgataggcatccgggtggtgctcaaaagcagcttcgcctggctgatacgttggtcctcgcgccagcttaagacgctaatccctaactgctggcggaaaagatgtgacagacgcgacggcgacaagcaaacatgctgtgcgacgctggcgatatcaaaattgctgtctgccaggtgatcgctgatgtactgacaagcctcgcgtacccgattatccatcggtggatggagcgactcgttaatcgcttccatgcgccgcagtaacaattgctcaagcagatttatcgccagcagctccgaatagcgcccttccccttgcccggcgttaatgatttgcccaaacaggtcgctgaaatgcggctggtgcgcttcatccgggcgaaagaaccccgtattggcaaatattgacggccagttaagccattcatgccagtaggcgcgcggacgaaagtaaacccactggtgataccattcgcgagcctccggatgacgaccgtagtgatgaatctctcctggcgggaacagcaaaatatcacccggtcggcaaacaaattctcgtccctgatttttcaccaccccctgaccgcgaatggtgagattgagaatataacctttcattcccagcggtcggtcgataaaaaaatcgagataaccgttggcctcaatcggcgttaaacccgccaccagatgggcattaaacgagtatcccggcagcaggggatcattttgcgcttcagccatacttttcatactcccgccattcagagaagaaaccaattgtccatattgcatcagacattgccgtcactgcgtcttttactggctcttctcgctaaccaaaccggtaaccccgcttattaaaagcattctgtaacaaagcgggaccaaagccatgacaaaaacgcgtaacaaaagtgtctataatcacggcagaaaagtccacattgattatttgcacggcgtcacactttgctatgccatagcatttttatccataagattagcggatcctacctgacgctttttatcgcaactctctactgtttctccatacccgggatccgaattcgagcgaaggagatatacatatgtttttgcaaagacctaaaccttacagcgatgaaagtttagaaagtttctttatccgagtggctaacaaaaatggctacggtgatgtccatcgcttcctagaagccactaaacgattccttcaagacattgaccataatggctatcaaacctttccgactgatataactcggataaacccatactcagctaaaaacagttccagcgcacgaactgcgtcattcctgaaacttgcacaattgacatttaatgaaccgccagagctacttgggttggcaattaacagaacaaacatgaaatactcgccgtcaactagcgcggttgttagaggtgcagaagtctttcctcgcagtttactacggacgcactccatcccctgctgtcctttgtgtctgcgagaaaatggctacgcctcctacctttggcactttcaggggtacgaatactgccacagccataacgtacctttaattaccacttgtagctgtggtaaggagtttgactaccgagtatctgggttaaagggcatttgctgcaaatgcaaggagcctatcaccttaaccagcagggagaacggtcatgaggcagcgtgtactgtttcaaactggcttgctggccatgaatctaaacctctgccaaatcttcctaaaagctaccgatggggtttagttcattggtggatgggtattaaagatagcgagttcgatcacttttcgttcgttcaatttttctcaaactggccaaggtcattccactcgataatcgaagatgaagtagagttcaaccttgagcatgctgttgtcagcacgtctgaattacgactaaaagatcttcttggtcgattgtttttcggttcaattcggttacctgagcggaatcttcaacacaatatcatccttggtgagcttctctgctatttagaaaatcgtttatggcaagacaagggattaatcgccaacctcaaaatgaacgcgttagaggcgactgtaatgttaaattgtagcctcgatcagattgcatcaatggttgaacaacgcatcttgaagccaaatcgaaaaagcaagcccaacagccctcttgatgttaccgattatctatttcatttcggcgatattttctgtctttggttagctgagttccaaagcgatgagtttaaccgttcgttttatgtgtcgaggtggtaaatgcaaactctgaaagaactaatcgcatccaatcctgacgacttaacaactgaacttaagagagcatttcgtccactcacaccgcatattgcaattgatggtaatgaacttgacgcactgacgatattagtcaatttaaccgataagactgatgatcagaaagacctgctcgatcgagccaaatgcaagcaaaaacttcgagatgaaaaatggtgggctagctgcataaattgcgttaattacagacaaagccataacccaaaattcccggatatacgttctgaaggcgtgattcgaacccaagccctgggtgaattaccgagtttcctactctcgtcctcaaaaatcccaccataccattggtcatatagccatgattcaaaatacgtcaacaaaagcgcattcctcaccaatgagttttgttgggatggtgagatctcatgtttgggtgagcttcttaaagatgcagatcacccactttggaatactttgaaaaagttaggttgttctcaaaaaacttgcaaagcaatggcaaaacaactagctgatattactctcacgactatcaatgtcacactcgcaccaaattacctgactcaaatatctctccccgatagtgatacatcctacatttcactctctcctgttgcatcgctatcgatgcaaagccactttcatcagaggctccaagatgaaaatcggcatagcgcgataacgcggtttagccgaactaccaacatgggggtcactgcgatgacatgtggcggcgcatttagaatgttaaagtctggcgctaagttttccagcccccctcatcaccgattaaacagtaaacgaagttggttgacgtcagagcatgttcagtcattaaaacagtaccagcgcctcaacaaaagcctcatacctgaaaactctcggattgcactccgtagaaaatacaaaatcgagcttcaaaatatggtcagatcttggtttgcaatgcaagaccatacccttgattcgaacatacttatccaacatttgaatcatgacctatcttacttaggagccacaaaacgttttgcatacgatccagcgatgaccaagctctttactgagcttttgaaacgagagttatcaaattcaatcaataatggtgagcaacacactaatggatcgtttttagtcctaccgaatatcagggtttgtggcgcaacagctttaagctccccggtaacggtggggattccatcacttacagctttctttggcttcgttcacgcatttgaacggaatataaatcgcaccacctcatcgtttcgtgttgaatcctttgcgatatgcgtccatcaactacatgtcgagaagcgaggtttgacagcagagtttgtggaaaaaggcgacgggactatatccgctcccgcgacccgggatgactggcagtgtgatgtcgtatttagccttattttgaacaccaactttgctcaacatattgaccaagatacgttagttacatcactaccaaagcgattggctcggggttcagcaaaaattgcgattgatgactttaaacatatcaactcattctcgacattagaaacagcgatcgaatctctgccaatagaagctggtaggtggttatcactttacgcacagtcaaacaataatctaagtgatctattagcagccatgacagaggaccatcagctcatggcaagctgcgtcggttaccacttgttagaagagcccaaagataaaccaaactccctcagaggttacaaacacgctatcgccgagtgcatcattggactcattaactcaatcacctttagctcagagactgatcccaacacaatcttttggtcgctaaagaactatcaaaactacctagtggtacagccaaggagtatcaacgatgaaactaccgacaaatctagcctatgagcgctctatcgacccatcagatgtctgtttttttgtcgtctggcccgatgatagaaaaacacctttaacctacaattctcgtactctgctcgggcaaatggaagcggcatcattagcctatgatgtctcaggtcaaccaataaaaagtgccaccgctgaggcgttagctcaagggaaccctcatcaagttgatttctgccacgttccatacggtgcgagtcatattgaatgcagtttctccgtctcgttttcttctgaactacgtcaaccatataagtgtaactcaagcaaagttaaacaaacgctagtgcaattagtcgagctctacgaaacgaaaatcggctggactgagctagcaacccgatatttgatgaacatttgcaacggtaaatggctgtggaaaaatacccgtaaagcctattgctggaacattgtacttacaccttggccttggaacggggaaaaggttggatttgaagatattcgtactaactacacctcacggcaagactttaaaaataataaaaattggtctgctatagttgaaatgatcaaaaccgcattttctagtactgatgggctggcgatatttgaagtcagggccaccttgcacttgccaacgaatgctatggtgcggccaagccaagttttcacagaaaaagaaagtggcagtaaaagtaaatctaaaactcaaaacagtcgagtttttcagagtacaactattgatggtgaacgatcgccaatactaggggcctttaaaacgggagcagctattgcaaccattgacgactggtatcctgaagccactgagccactaagggtcggacggtttggggttcatcgcgaagatgtcacttgctaccgtcatccgtctaccggaaaagattttttctcgatattacaacaagcagagcactatattgaagtgttgagcgccaacaaaactcccgctcaagaaactatcaacgacatgcactttttaatggctaacctgattaagggtgggatgttccagcataaaggagactgactgtgaaatggtattataagacaatcacctttctgccagagttgtgcaacaacgagtcactggctgcaaagtgtctccgcgttctgcatggatttaactatcagtatgagacacgaaatatcggcgtttcatttccgctttggtgtgatgcaacggttggaaaaaagatttcatttgtcagcaagaacaagatagaactcgacttactacttaaacaacactatttcgtccaaatggaacaacttcaatactttcatatatccaacactgttctcgtcccagaagattgtacatacgtttcctttagacgctgtcaatctatagataagctcacagcagcagggctggcaaggaaaatcagacgcctggagaaacgtgctctatctagaggcgagcaatttgacccatcatcttttgctcaaaaagagcatactgcaatagcgcactaccactcacttggggagtccagcaaacagacgaaccgcaactttcgactcaatatcaggatgctctcggagcaaccccgtgaggggaactcgatttttagtagctatggcttatcaaattcagaaaactcgtttcagcctgtacccttaatctgacctttaataaggagatataccatggcgacaagtttacctacgccctcagcaattacgacttcggcgttagagtatgcattccatactcccgctcgcaatctaacgaaatctcgcggaaaaaacattcatcgttatgtcagtgtaaagatgagtaagaggattacggtagaatctactctagagtgtgatgcctgctatcactttgattttgagccaagtattgttcgcttttgcgctcaaccgattcgatttttatattatctcaatggtcagtctcactcctatgttcctgactttctagttcaatttgataccaacgagtttgttctatatgaagtaaagtcagcttatgctaagaacaaacctgattttgatgttgaatgggaggcgaaagtaaaagcagcaactgaactagggctagaattggagcttgttgaagagagtgatattagggatacggttgtattaaataatcttaagcgcatgcatcgttatgcttcgaaagatgagctgaataacgtacataactctctcttaaaaataataaagtacaatggcgcccaatctgcaagatgcttgggagaacagttgggtttaaaaggccgaactgttttaccaattttgtgcgatttgctgtcaaggtgtttactcgatacacgtttggataagcctctatctcttgaatctcgatttgagttggccagttatggctaagaaagggttctcaagtttccatagaaaagcagtctcttcccaagatacgcttgaatcgatagagcttgtctctagcgctaattgtctagaaagtgttacgtatcaagatatatcagcatttcccgaaacaattgcggtagagattaatttccgattaagcattcttcgctttttagcgcgaaagtgcgaaaccattgtggccaaatcaattgaaccacatcgtgtagagctacagcaaaactatagtagaaaaatacccagtgcaataacgatatatcgatggtggcttgcttttcgaaaatcagactacaaccccattagcttagcacctaatatcaaggatagaggtaatagagagacaaaagtgtcaacagttgttgattctattatggaacaggcagttgaaagagttatatctggacgaaaagtcaatgttagctctgcatataaacgtgttcgacgaaaagttcgtcaatacaatctaactcatggaacgaaatacacgtatcctaagtacgaatctgtaagaaagcgagtaaaaaagaaaaccccatttgagttattagccgcagggaaaggggagagagtagctaagagagagtttcgccgaatgggaaaaaagatcctcacgtctagcgtgctagagagggttgaaatagatcacactgtcgttgacctttttgcagtacacgaagagtatcgaatcccattgggccgaccttggcttactcaattggttgattgttacagtaaagctgtaatcggtttttatttaggtttcgagcctcctagctatgtgtcggtttcccttgcacttaagaatgcaatacaacgcaaagatgacttaatctcctcgtatgaatcgatcgagaatgaatggctatgttatggcatcccagacctactcgtaactgataatggtaaagagtttttgtcgaaagcatttgatcaagcatgtgaatcactattgatcaatgtgcatcaaaataaagttgagacgcccgacaacaaacctcatgttgaacgtaactacgggactattaatacttctctgttagacgatttacctgggaaatccttcagccagtaccttcaaagagaagggtacgactctgtgggagaagctacccttacactcaatgagattagagaaatttacttaatttggttggtggatatttatcataaaaaacccaatcagagaggcactaattgtcctaatgttgcgtggaaaaagggttgtcaagaatgggaaccagaggagttctctggttctaaagacgaattagactttaaatttgctattgttgattacaaacaacttactaaagtagggataactgtctacaaagaactgagttatagcaatgaccgtttagctgaatatagagggaagaaaggaaaccataaagttcagttcaagtataaccctgagtgtatggcagttatttgggtgttggatgaggatatgaatgagtactttacagttaatgcgattgactacgaatatgcaagtagagtatcactttggcaacataaatataacatgaaatatcaagcagaactaaattcagcagaatatgatgaggacaaggaaattgatgcagaaataaaaattgaagaaatcgcagatcgttcaattgttaagactaacaaaatcagagctcggaggcgtggcgctaggcatcaagagaatagcgcaagggctaagtcaatcagtaatgcgaacccggcctcgatacaaaaacatgaagatgaaatcgttagtgcagataatgacgattgggatattgattatgtctgagaaatcgtcaaatgagtgaaacgcgtgaggctcgtatatcaagagctaaaagggcatttgtatccacaccgagcgttaggaaaatcttgagttacatggatagatgtagagatctatcagacctagagtctgagcctacatgcatgatggtctatggtgcttcgggtgtaggtaaaacgaccgtcatcaagaaatacttaaatcaaaacagaagagagtccgaagccgggggcgatataataccggttttgcatattgagttgccagacaatgcgaagccagtagatgcagcaagggaattgctggttgaaatgggtgacccgctagcactttatgaaactgacttagctagattgacgaaaagactgactgaattaatccctgcggtcggcgtgaagctgattattatcgatgagttccaacatttggtggaagaaaggtcaaatcgggttcttacccaagtaggtaattggctaaaaatgatacttaacaaaacgaaatgtccaattgttatatttggtatgccatactcaaaagttgtactgcaagcaaactcgcaacttcacgggcgattttccattcaggttgaactgcgcccctttagctaccagggaggtagaggtgtatttaaaacttttttggaataccttgataaagccctaccttttgaaaaacaggctggcttagccaacgaaagtttgcagaaaaaattgtatgcattctctcagggaaacatgcgttcgttgagaaaccttatttatcaagcatctatcgaagcaattgataatcagcatgagacgataaccgaagaagatttcgtttttgcatcgaagttgacatcgggcgataaacccaactcatggaaaaatccttttgaggagggtgttgaggtaacagaagatatgttacgaccgccaccaaaagatattggttgggaggactatttgagacattcaaccccgagagtgagtaaaccaggtagaaataaaaactttttcgaataacctaggctgctgcgctgctgccaccgctgagcaataactagcataaccccttggggcctctaaacgggtcttgaggggttttttgctgaaacctcaggcattgaacctgcacggtaccgagctcgaattcactggccgtcgttttacaacgtcgtgactgggaaaaccctggcgttacccaacttaatcgccttgctatcgtggccggatcttgcggcccctcggcttgaacgaattgttagacattattcctttgccctcggacgagtgctggggcgtcggtttccactatcggcaagtacttctacacagccatcggtccagacggccgcgcttctgcgggcgatttgtgtacgcccgacagtcccggctccggatcggacgattgcgtcgcatcgaccctgcgcccaagctgcatcatcgaaattgccgtcaaccaagctctgatagagttggtcaagaccaatgcggagcatatacgcccggagccgcggcgatcctgcaagctccggatgcctccgctcgaagtagcgcgtctgctgctccatacaagccaaccacggcctccagaagaagatgttggcgacctcgtattgggaatccccgaacatcgcctcgctccagtcaatgaccgctgttatgcggccattgtccgtcaggacattgttggagccgaaatccgcgtgcacgaggtgccggacttcggggcagtcctcggcccaaagcatcagctcatcgagagcctgcgcgacggacgcactgacggtgtcgtccatcacagtttgccagtgatacacatggggatcagcaatcgcgcatatgaaatcacgccatgtagtgtattgaccgattccttgcggtccgaatgggccgaacccgctcgtctggctaagatcggccgcagcgatcgcatccatggcctccgcgaccggctgcagaacagcgggcagttcggtttcaggcaggtcttgcaacgtgacaccctgtgcacggcgggagatgcaataggtcaggctctcgctgaattccccaatgtcaagcacttccggaatcgggagcgcggccgatgcaaagtgccgataaacataacgatctttgtagaaaccatcggcgcagctatttacccgcaggacatatccacgccctcctacatcgaagctgaaagcacgagattcttcgccctccgagagctgcatcaggtcggagacgctgtcgaacttttcgatcagaaacttctcgacagacgtcgcggtgagttcaggctttttcatgattgtcctccgattcaactcttcctttttcaatattattgaagcatttatcagggttattgtctcatgagcggatacatatttgaatgtatttagaaaaataaacaaatagctagctcactcggtcgctacgctccgggcgtgagactgcggcgggcgctgcggacacatacaaagttacccacagattccgtggataagcaggggactaacatgtgaggcaaaacagcagggccgcgccggtggcgtttttccataggctccgccctcctgccagagttcacataaacagacgcttttccggtgcatctgtgggagccgtgaggctcaaccatgaatctgacagtacgggcgaaacccgacaggacttaaagatccccaccgtttccggcgggtcgctccctcttgcgctctcctgttccgaccctgccgtttaccggatacctgttccgcctttctcccttacgggaagtgtggcgctttctcatagctcacacactggtatctcggctcggtgtaggtcgttcgctccaagctgggctgtaagcaagaactccccgttcagcccgactgctgcgccttatccggtaactgttcacttgagtccaacccggaaaagcacggtaaaacgccactggcagcagccattggtaactgggagttcgcagaggatttgtttagctaaacacgcggttgctcttgaagtgtgcgccaaagtccggctacactggaaggacagatttggttgctgtgctctgcgaaagccagttaccacggttaagcagttccccaactgacttaaccttcgatcaaaccacctccccaggtggttttttcgtttacagggcaaaagattacgcgcagaaaaaaaggatctcaagaagatcctttgatcttttctactgaaccgctctagatttcagtgcaatttatctcttcaaatgtagcacctgaagtcagccccatacgatataagttgtaattctcatgt

SEQ ID NO: 60 - DNA, 62 bp, synthetic construct
  source 1..62: mol_type = other DNA
aatgatacggcgaccaccgagatctacactatcctctatcgcggatccccggaaatgacctc

SEQ ID NO: 61 - DNA, 62 bp, synthetic construct
  source 1..62: mol_type = other DNA
aatgatacggcgaccaccgagatctacaccctagagtatcgcggatccccggaaatgacctc

SEQ ID NO: 62 - DNA, 62 bp, synthetic construct
  source 1..62: mol_type = other DNA
aatgatacggcgaccaccgagatctacacctctctatatcgcggatccccggaaatgacctc

SEQ ID NO: 63 - DNA, 62 bp, synthetic construct
  source 1..62: mol_type = other DNA
aatgatacggcgaccaccgagatctacacagagtagaatcgcggatccccggaaatgacctc

SEQ ID NO: 64 - DNA, 33 bp, synthetic construct
  source 1..33: mol_type = other DNA
gcggatccccggaaatgacctcgaggaaaatgt

SEQ ID NO: 65 - DNA, 94 bp, synthetic construct
  source 1..94: mol_type = other DNA
ccctataccttgtctgcctccccgcgttgcgtcgcggtgcatggagccgggccacctcgacctgatgaaataccgcacagatgcgtaaggagaa

SEQ ID NO: 66 - DNA, 90 bp, synthetic construct
  source 1..90: mol_type = other DNA
gaaaaaagacataccagggggcgctaatcggttgttgtagtgtgctcatttgcggtgttgactggattcgcggccgcttctagagtttac

SEQ ID NO: 67 - DNA, 90 bp, synthetic construct
  source 1..90: mol_type = other DNA
gtgcagtgctttggaaatggtcccctcgggggagttgtcattattttctatgctatttgcttattattcgcggccgcttctagagtttac

SEQ ID NO: 68 - DNA, 120 bp, synthetic construct
  source 1..120: mol_type = other DNA
tgcaaaaccagacagttccgcaaaccgccggcgaacaggccgtgctggcgcaacgtatcgttgacaagatctggcgcgatgcgatgagtgaataaattcgcggccgcttctagagtttac

SEQ ID NO: 69 - DNA, 85 bp, synthetic construct
  source 1..85: mol_type = other DNA
attgggggcgattctctgcagcccccgtcactgctggggttgagtcatcttgacgtctgcattcgcggccgcttctagagtttac

SEQ ID NO: 70 - DNA, 90 bp, synthetic construct
  source 1..90: mol_type = other DNA
gccgtctgcaggcgctctatctgcgcgagcagggctttaacaatgtgaaggtatatcgcccgtaaattcgcggccgcttctagagtttac

SEQ ID NO: 71 - DNA, 91 bp, synthetic construct
  source 1..91: mol_type = other DNA
gataactaccggttgatccaagcttcctgacagagttatccacagtagatcgcacgatctgtatacattcgcggccgcttctagagtttac

SEQ ID NO: 72 - DNA, 94 bp, synthetic construct
  source 1..94: mol_type = other DNA
aaaattgtaggccggacaaggcgctcgcgccgcatccggcattgttcatttgctgtagatgacactgaaataccgcacagatgcgtaaggagaa

SEQ ID NO: 73 - DNA, 94 bp, synthetic construct
  source 1..94: mol_type = other DNA
atggcttaattgataagctggcacgccagttgaccaaacataaagataaactgaaacaacactaatgaaataccgcacagatgcgtaaggagaa

SEQ ID NO: 74 - DNA, 93 bp, synthetic construct
  source 1..93: mol_type = other DNA
cctcgcataacgcggtatgaaaatggattgaagcccgggccgtggattctactcaactttgtcgtgaaataccgcacagatgcgtaaggagaa

SEQ ID NO: 75 - DNA, 120 bp, synthetic construct
  source 1..120: mol_type = other DNA
taatggcggtcgtgctggcggggattgccgcgtacttcgctgcactggcggtactgggcttcaaagttaaagaatttgcccgccggacggtgtaaattcgcggccgcttctagagtttac

SEQ ID NO: 76 - DNA, 90 bp, synthetic construct
  source 1..90: mol_type = other DNA
ctatgaatcaactacttagatggtattagtgacctgtagaagttcctattctctagaaagtatagattcgcggccgcttctagagtttac

SEQ ID NO: 77 - DNA, 94 bp, synthetic construct
  source 1..94: mol_type = other DNA
ttttcgcttatcagaatcgtcggcggcgcttatctcttatggtttgcgtggtgcagcatgcgccgtgaaataccgcacagatgcgtaaggagaa

SEQ ID NO: 78 - DNA, 94 bp, synthetic construct
  source 1..94: mol_type = other DNA
gttaaacactagcttaatagtggatatttcaaattaggaatttattaaattcacctgatgaatattgaaataccgcacagatgcgtaaggagaa

SEQ ID NO: 79 - DNA, 120 bp, synthetic construct
  source 1..120: mol_type = other DNA
ccacgggcaaaacgcctgcaaggcaggcgctgaaagaggcgaatagtctacctggattatggtgaattgctaccgccagatgttacagggttgaaataccgcacagatgcgtaaggagaa

SEQ ID NO: 80 - DNA, 89 bp, synthetic construct
  source 1..89: mol_type = other DNA
gtcaatgttatcgtttatatgcacttctggcgcacaagaggcaccttaaccgcccgtaaatgaaataccgcacagatgcgtaaggagaa

SEQ ID NO: 81 - DNA, 94 bp, synthetic construct
  source 1..94: mol_type = other DNA
tattacgagtaatgtcggatgcggcaaacgtcgcatctgaccagatgcgacgtaaaaaccacaaatgaaataccgcacagatgcgtaaggagaa

SEQ ID NO: 82 - DNA, 94 bp, synthetic construct
  source 1..94: mol_type = other DNA
atcacgacattccggaagatccggcagaagaatggctgggaagctgggttaatttactcaaataatgaaataccgcacagatgcgtaaggagaa

SEQ ID NO: 83 - DNA, 90 bp, synthetic construct
  source 1..90: mol_type = other DNA
ttattaccatgtacgaagaccagcagcctgataactggcgcgtacaggcgatactgtatgcatgaattcgcggccgcttctagagtttac

SEQ ID NO: 84 - DNA, 90 bp, synthetic construct
  source 1..90: mol_type = other DNA
aaccgtacaaatggcccgttgtgccgcacaacagaccgccatgcacatgctaattgcccggacaaattcgcggccgcttctagagtttac

SEQ ID NO: 85 - DNA, 90 bp, synthetic construct
  source 1..90: mol_type = other DNA
tagaacagatctctaaataaatagatcttctttttaatacccaggatcccaggtctttctcaagcattcgcggccgcttctagagtttac

SEQ ID NO: 86 - DNA, 120 bp, synthetic construct
  source 1..120: mol_type = other DNA
gaacggtcagacctcaacaccccatcgcggcagtaaaaagatttcgatctgaatattatctccggcctgcactgcaggccggaatgcattgtgaaataccgcacagatgcgtaaggagaa

SEQ ID NO: 87 - DNA, 88 bp, synthetic construct
  source 1..88: mol_type = other DNA
aatgggcagcatagcttaatatgattcatgggctatacccccagatacttaagactcgtcctaccgctgataagcgcttttccgctgc

SEQ ID NO: 88 - DNA, 88 bp, synthetic construct
  source 1..88: mol_type = other DNA
gcccacagtacggttgatgtcctatgcgctcctgataatgctagcgaacagtgggaggcaggtaggctgataagcgcttttccgctgc

SEQ ID NO: 89 - DNA, 88 bp, synthetic construct
  source 1..88: mol_type = other DNA
ctccggttcgcgtggtattcactccccgcgcgtggacgctgggtgtttacttcggtctgattaacgctgataagcgcttttccgctgc

SEQ ID NO: 90 - DNA, 97 bp, synthetic construct
  source 1..97: mol_type = other DNA
cgatcctgctgccggtgtggattgtattcctgtttatggcatttaaaacgctgcgtcggaaataactaataatactagtagcggccgctgcagtccg

SEQ ID NO: 91 - DNA, 89 bp, synthetic construct
  source 1..89: mol_type = other DNA
ggatggtgacgattacgcgcaatccggcaataataggttacagtgtcacgtttttttatctcttagagccccaactggggtaacctttg

SEQ ID NO: 92 - DNA, 120 bp, synthetic construct
  source 1..120: mol_type = other DNA
acctgatatgaaaggcaatgccaccacgccacaggttgccgacgcgatttgcaaaattattttgcgttaaggtcaaaccagtttatttgaaccgcggagccccaactggggtaacctttg

SEQ ID NO: 93 - DNA, 89 bp, synthetic construct
  source 1..89: mol_type = other DNA
cgtgaactacagaatatattcaaccaagaaatagaataatatactctaaataattcaaattggtcgagccccaactggggtaacctttg

SEQ ID NO: 94 - DNA, 89 bp, synthetic construct
  source 1..89: mol_type = other DNA
tttctattaacgaaaaaaagcggaagaggtcgccctcttccgcttagtaacttgctacttaagccgagccccaactggggtaacctttg

SEQ ID NO: 95 - DNA, 89 bp, synthetic construct
  source 1..89: mol_type = other DNA
ggtgtgaatataaaccccaaaccaccacggaagccggtttacgctggatggatccgtaccgttaagagccccaactggggtaacctttg

SEQ ID NO: 96 - DNA, 88 bp, synthetic construct
  source 1..88: mol_type = other DNA
ctggctcgttggcctttggcaacgattatcctatgagattggggcaattacgcgccctcgtcaaagctgataagcgcttttccgctgc

SEQ ID NO: 97 - DNA, 88 bp, synthetic construct
  source 1..88: mol_type = other DNA
tttctattaacgaaaaaaagcggaagaggtcgccctcttccgcttagtaacttgctacttaagccgctgataagcgcttttccgctgc

SEQ ID NO: 98 - DNA, 88 bp, synthetic construct
  source 1..88: mol_type = other DNA
atggcttaattgataagctggcacgccagttgaccaaacataaagataaactgaaacaacactaagctgataagcgcttttccgctgc

SEQ ID NO: 99 - DNA, 120 bp, synthetic construct
  source 1..120: mol_type = other DNA
agagtggcgcattaggtgacccatgttgttccgtttagtcatgatgaaatattcaggtaaggggaattatcgttacgcattgagtgagggtatgccgagccccaactggggtaacctttg

SEQ ID NO: 100 - DNA, 105 bp, synthetic construct
  source 1..105: mol_type = other DNA
ggatggtgacgattacgcgcaatccggcaataataggttacagtgtcacgtttttttatctcttagaattcgtctcatgacagcgcttatctttaatcatattcc

SEQ ID NO: 101 - DNA, 89 bp, synthetic construct
  source 1..89: mol_type = other DNA
taccttgagctgcagatgtatttggagaattacatcatggcgccacttcttccccaagttctagtgagccccaactggggtaacctttg

SEQ ID NO: 102 - DNA, 89 bp, synthetic construct
  source 1..89: mol_type = other DNA
ttacaatgggagatcggaaggtacgaattcggtctaccttcagcgtcgactggtcatgtagcgcagagccccaactggggtaacctttg

SEQ ID NO: 103 - DNA, 89 bp, synthetic construct
  source 1..89: mol_type = other DNA
tgcgcgctggcaccaatctcaatatagaaagcgggtaaccaggcaatcaggctggcgtaaccgccgagccccaactggggtaacctttg

SEQ ID NO: 104 - DNA, 94 bp, synthetic construct
  source 1..94: mol_type = other DNA
tcatcgaatggatgagagcggtttcggatggttgacatcgttttgtcggatgtagcgtgaatgcctgaaataccgcacagatgcgtaaggagaa

SEQ ID NO: 105 - DNA, 88 bp, synthetic construct
  source 1..88: mol_type = other DNA
gggcaatgaaacacgggcgactattttgcggcaaaagaggccagccgcaaaagcagtgcgtgcttgctgataagcgcttttccgctgc

SEQ ID NO: 106 - DNA, 120 bp, synthetic construct
  source 1..120: mol_type = other DNA
aatacggaaagccataaaacacgaaacggaaacaataaaaggtgaaatgacgcaggttatttactgcaaagaacgaataaaaaaaccgcgtcagtgagctgataagcgcttttccgctgc

SEQ ID NO: 107 - DNA, 88 bp, synthetic construct
  source 1..88: mol_type = other DNA
ggaccccgttgcaattaagataatgagatttataatccaggccattgggacgttgcgccggatcggctgataagcgcttttccgctgc

SEQ ID NO: 108 - DNA, 88 bp, synthetic construct
  source 1..88: mol_type = other DNA
ttaactctctgactccggaacagcagcgcgacgttatcgctcgtacctttactgaaagcctgtaagctgataagcgcttttccgctgc

SEQ ID NO: 109 - DNA, 88 bp, synthetic construct
  source 1..88: mol_type = other DNA
tcagacaacacgatcccctgccaacttagcggcctaaaaaagcattgtctgaatagcgttacgttgctgataagcgcttttccgctgc

SEQ ID NO: 110 - DNA, 89 bp, synthetic construct
  source 1..89: mol_type = other DNA
gtccgctggacgatccgcaaatcaacgaagtgttgcgccaaccgcgtaaagaaaaagcgcaatgagagccccaactggggtaacctttg

SEQ ID NO: 111 - DNA, 89 bp, synthetic construct
  source 1..89: mol_type = other DNA
ttaactctctgactccggaacagcagcgcgacgttatcgctcgtacctttactgaaagcctgtaagagccccaactggggtaacctttg

SEQ ID NO: 112 - DNA, 89 bp, synthetic construct
  source 1..89: mol_type = other DNA
aaccgtacaaatggcccgttgtgccgcacaacagaccgccatgcacatgctaattgcccggacaagagccccaactggggtaacctttg

SEQ ID NO: 113 - DNA, 120 bp, synthetic construct
  source 1..120: mol_type = other DNA
tgtcgttgatttctctttttttaacccctctactcaacagatacccggttaaacctagtcgggtgtaactacataaatccataataatcgttgacatgctgataagcgcttttccgctgc

SEQ ID NO: 114 - DNA, 32 bp, synthetic construct
  source 1..32: mol_type = other DNA
cggcatgctcgaaaaggtgcaatggtatgata

SEQ ID NO: 115 - DNA, 25 bp, synthetic construct
  source 1..25: mol_type = other DNA
gggagagtgggctgaaatgggaagc

SEQ ID NO: 116 - DNA, 25 bp, synthetic construct
  source 1..25: mol_type = other DNA
cagtgcgattgctgatgctgtatgt

SEQ ID NO: 117 - DNA, 22 bp, synthetic construct
  source 1..22: mol_type = other DNA
caacgtgggtttgtcggctgtg

SEQ ID NO: 118 - DNA, 24 bp, synthetic construct
  source 1..24: mol_type = other DNA
ccagcagccaaatcgtaagcaaag

SEQ ID NO: 119 - DNA, 21 bp, synthetic construct
  source 1..21: mol_type = other DNA
gagcaccaaatttggcgatct

SEQ ID NO: 120 - DNA, 25 bp, synthetic construct
  source 1..25: mol_type = other DNA
tcctggaccgtataagctgggatca

SEQ ID NO: 121 - DNA, 30 bp, synthetic construct
  source 1..30: mol_type = other DNA
agtgtgtgtgtaagcgtatacgactgatgc

SEQ ID NO: 122 - DNA, 24 bp, synthetic construct
  source 1..24: mol_type = other DNA
cgcactgttgcgaagtaccgagag

SEQ ID NO: 123 - DNA, 24 bp, synthetic construct
  source 1..24: mol_type = other DNA
agcagagtctgttgacccatacgc

SEQ ID NO: 124 - DNA, 21 bp, synthetic construct
  source 1..21: mol_type = other DNA
ttggtccgttgaaacatgccg

SEQ ID NO: 125 - DNA, 25 bp, synthetic construct
  source 1..25: mol_type = other DNA
ggtgcagatggtcgtacccagtatc

SEQ ID NO: 126 - DNA, 37 bp, synthetic construct
  source 1..37: mol_type = other DNA
cgcgagctattatcagtcgttattatctcaggtacgg

SEQ ID NO: 127 - DNA, 22 bp, synthetic construct
  source 1..22: mol_type = other DNA
tcttgctactgctgacttgcgg

SEQ ID NO: 128 - DNA, 23 bp, synthetic construct
  source 1..23: mol_type = other DNA
gttcatggcgattctcaacgtgt

SEQ ID NO: 129 - DNA, 20 bp, synthetic construct
  source 1..20: mol_type = other DNA
ctcaagcagcgcatcgccaa

SEQ ID NO: 130 - DNA, 20 bp, synthetic construct
  source 1..20: mol_type = other DNA
gtcgccggcaatcattacgc

SEQ ID NO: 131 - DNA, 20 bp, synthetic construct
  source 1..20: mol_type = other DNA
gctgggagcgctacgcctac

SEQ ID NO: 132 - DNA, 20 bp, synthetic construct
  source 1..20: mol_type = other DNA
tggctgaagaccggcaagtg

SEQ ID NO: 133 - DNA, 31 bp, synthetic construct
  source 1..31: mol_type = other DNA
agaaagtatagattcgcggccgcttctagag

SEQ ID NO: 134 - DNA, 25 bp, synthetic construct
  source 1..25: mol_type = other DNA
cagtcagggcataaacgccagtaac

SEQ ID NO: 135 - DNA, 25 bp, synthetic construct
  source 1..25: mol_type = other DNA
cttcttcgcgaggcgataccatgag

SEQ ID NO: 136 - DNA, 23 bp, synthetic construct
  source 1..23: mol_type = other DNA
ccatccctgcgccaaagattctg

SEQ ID NO: 137 - DNA, 22 bp, synthetic construct
  source 1..22: mol_type = other DNA
caaacgcaggggtcggcaggat

SEQ ID NO: 138 - DNA, 25 bp, synthetic construct
  source 1..25: mol_type = other DNA
ggatgcacgggtaaaattgctgacc

SEQ ID NO: 139 - DNA, 26 bp, synthetic construct
  source 1..26: mol_type = other DNA
tgtggggctatcgataaactcgaggc

SEQ ID NO: 140 - DNA, 27 bp, synthetic construct
  source 1..27: mol_type = other DNA
gctgcaattagtgacttatcctgcgag

SEQ ID NO: 141 - DNA, 22 bp, synthetic construct
  source 1..22: mol_type = other DNA
aaacggcggcagatggttttgt

SEQ ID NO: 142 - DNA, 23 bp, synthetic construct
  source 1..23: mol_type = other DNA
atccttgttatccacagggcagt

SEQ ID NO: 143 - DNA, 22 bp, synthetic construct
  source 1..22: mol_type = other DNA
aacggctggttactggaaggac

SEQ ID NO: 144 - DNA, 32 bp, synthetic construct
  source 1..32: mol_type = other DNA
agaaaatcgaacttctcccctaccacgaactg

SEQ ID NO: 145 - DNA, 20 bp, synthetic construct
  source 1..20: mol_type = other DNA
cgcagatgcagtcgagccag

SEQ ID NO: 146 - DNA, 24 bp, synthetic construct
  source 1..24: mol_type = other DNA
gcaggtcagtccggtctttatgag

SEQ ID NO: 147 - DNA, 20 bp, synthetic construct
  source 1..20: mol_type = other DNA
agcgggtggagcaggtagtg

SEQ ID NO: 148 - DNA, 20 bp, synthetic construct
  source 1..20: mol_type = other DNA
cctgggcccgatactctgcg

SEQ ID NO: 149 - DNA, 26 bp, synthetic construct
  source 1..26: mol_type = other DNA
caggttgcagttatcgaccggaaagc

SEQ ID NO: 150 - DNA, 20 bp, synthetic construct
  source 1..20: mol_type = other DNA
acgattcggaagccaccctc

SEQ ID NO: 151 - DNA, 25 bp, synthetic construct
  source 1..25: mol_type = other DNA
cacggcttttagacggaccacttcc

SEQ ID NO: 152 - DNA, 25 bp, synthetic construct
  source 1..25: mol_type = other DNA
gggggtagcaccaatagaacttgcg

SEQ ID NO: 153 - DNA, 25 bp, synthetic construct
  source 1..25: mol_type = other DNA
acctggtatcaaacactcgcctggt

SEQ ID NO: 154 - DNA, 27 bp, synthetic construct
  source 1..27: mol_type = other DNA
gcaacgctgctgttgaactggattatg

SEQ ID NO: 155 - DNA, 23 bp, synthetic construct
  source 1..23: mol_type = other DNA
cggagaatggtcgccagacagaa

SEQ ID NO: 156 - DNA, 21 bp, synthetic construct
  source 1..21: mol_type = other DNA
gcgcataacggtattctggca

SEQ ID NO: 157 - DNA, 23 bp, synthetic construct
  source 1..23: mol_type = other DNA
gtgatcgagaagatgctgacccg

SEQ ID NO: 158 - DNA, 25 bp, synthetic construct
  source 1..25: mol_type = other DNA
cagcgattgtttcgccagtatggtc

SEQ ID NO: 159 - DNA, 22 bp, synthetic construct
  source 1..22: mol_type = other DNA
gcgaaccgggaaccggagaaat

SEQ ID NO: 160 - DNA, 34 bp, synthetic construct
  source 1..34: mol_type = other DNA
ttctaaaacccaggattcgtgatagctcgactga

SEQ ID NO: 161 - DNA, 21 bp, synthetic construct
  source 1..21: mol_type = other DNA
cggcatctctttaatggcggc

SEQ ID NO: 162 - DNA, 36 bp, synthetic construct
  source 1..36: mol_type = other DNA
gaaataatgaattcttgctggcaaaaacgcgactgg

SEQ ID NO: 163 - DNA, 20 bp, synthetic construct
  source 1..20: mol_type = other DNA
gattgccgaactcaccggct

SEQ ID NO: 164 - DNA, 21 bp, synthetic construct
  source 1..21: mol_type = other DNA
gagcgcttaccgcattctgac

SEQ ID NO: 165 - DNA, 24 bp, synthetic construct
  source 1..24: mol_type = other DNA
cgcacccgattgatcatggtcctg

SEQ ID NO: 166 - DNA, 20 bp, synthetic construct
  source 1..20: mol_type = other DNA
agcgcttcgaaagggtcaag

SEQ ID NO: 167 - DNA, 20 bp, synthetic construct
  source 1..20: mol_type = other DNA
cgggaaccctggatccgcca

SEQ ID NO: 168 - DNA, 20 bp, synthetic construct
  source 1..20: mol_type = other DNA
acctcaagggcagcgtcaag

SEQ ID NO: 169 - DNA, 21 bp, synthetic construct
  source 1..21: mol_type = other DNA
gggtggccacgtgtcggaaat

SEQ ID NO: 170 - DNA, 23 bp, synthetic construct
  source 1..23: mol_type = other DNA
agcactgtatgtcagtccggatg

SEQ ID NO: 171 - DNA, 25 bp, synthetic construct
  source 1..25: mol_type = other DNA
gccatagcaggcatcagcaaagctc

SEQ ID NO: 172 - DNA, 25 bp, synthetic construct
  source 1..25: mol_type = other DNA
gacaacatctggtacgattcgcccg

SEQ ID NO: 173 - DNA, 22 bp, synthetic construct
  source 1..22: mol_type = other DNA
tgccagcccatcagcaacaaac

SEQ ID NO: 174 - DNA, 21 bp, synthetic construct
  source 1..21: mol_type = other DNA
atcaccagtcccattgccagc

SEQ ID NO: 175 - DNA, 22 bp, synthetic construct
  source 1..22: mol_type = other DNA
acctgctggtgaggcaggttct

SEQ ID NO: 176 - DNA, 23 bp, synthetic construct
  source 1..23: mol_type = other DNA
cctgaacgttaacgttctgcgtc

SEQ ID NO: 177 - DNA, 24 bp, synthetic construct
  source 1..24: mol_type = other DNA
gacatgtaattgatgaccggcacg

SEQ ID NO: 178 - DNA, 27 bp, synthetic construct
  source 1..27: mol_type = other DNA
attcgcagcaccgcgtggattaaagac

SEQ ID NO: 179 - DNA, 27 bp, synthetic construct
  source 1..27: mol_type = other DNA
gatgcgctgactgttagaagcatcgtg

SEQ ID NO: 180 - DNA, 33 bp, synthetic construct
  source 1..33: mol_type = other DNA
tggttttaggtccgggaaattacagcttcagtg

SEQ ID NO: 181 - DNA, 22 bp, synthetic construct
  source 1..22: mol_type = other DNA
ctcggatcaggcggtgatcttg

SEQ ID NO: 182 - DNA, 23 bp, synthetic construct
  source 1..23: mol_type = other DNA
agcgccgtcaatactaaatcagc

SEQ ID NO: 183 - DNA, 22 bp, synthetic construct
  source 1..22: mol_type = other DNA
ctggagatttcttcgggggcgg

SEQ ID NO: 184 - DNA, 20 bp, synthetic construct
  source 1..20: mol_type = other DNA
cgcgtctgctcgaaagaagg

SEQ ID NO: 185 - DNA, 22 bp, synthetic construct
  source 1..22: mol_type = other DNA
cctgcagatgcttgagcggtga

SEQ ID NO: 186 - DNA, 20 bp, synthetic construct
  source 1..20: mol_type = other DNA
cagccaggtgcatgtcgagg

SEQ ID NO: 187 - DNA, 33 bp, synthetic construct
  source 1..33: mol_type = other DNA
tatacgaattcgcggccgcttctagaggaaatc

SEQ ID NO: 188 - DNA, 35 bp, synthetic construct
  source 1..35: mol_type = other DNA
caacttaatatcatcggtaggccaaattgagcagc

SEQ ID NO: 189 - DNA, 30 bp, synthetic construct
  source 1..30: mol_type = other DNA
aatagtgcttatcccggtcgtttatttcgc

SEQ ID NO: 190 - DNA, 33 bp, synthetic construct
  source 1..33: mol_type = other DNA
gccaactttgtacaagaaagctgggtctgacaa

SEQ ID NO: 191 - DNA, 32 bp, synthetic construct
  source 1..32: mol_type = other DNA
catctaatgccggagtctgaataccagtgctc

SEQ ID NO: 192 - DNA, 33 bp, synthetic construct
  source 1..33: mol_type = other DNA
gtggagggcaagttccgtacgataaatatcact

SEQ ID NO: 193 - DNA, 30 bp, synthetic construct
  source 1..30: mol_type = other DNA
gagttcaagcgtaagaacgaaagccaactg

SEQ ID NO: 194 - DNA, 24 bp, synthetic construct
  source 1..24: mol_type = other DNA
tttcaacgaaaccgctcagggtca

SEQ ID NO: 195 - DNA, 26 bp, synthetic construct
  source 1..26: mol_type = other DNA
gattcacaggcggatcgcggtctata

SEQ ID NO: 196 - DNA, 24 bp, synthetic construct
  source 1..24: mol_type = other DNA
tcatgcgaccgtcatcaatgtgag

SEQ ID NO: 197 - DNA, 25 bp, synthetic construct
  source 1..25: mol_type = other DNA
ggtgacggcagttgaaagcaatgtg

SEQ ID NO: 198 - DNA, 24 bp, synthetic construct
  source 1..24: mol_type = other DNA
acagacactgcgctcttagcatgg

SEQ ID NO: 199 - DNA, 65 bp, synthetic construct
  source 1..65: mol_type = other DNA
ccctataccttgtctgcctccccgcgttgcgtcgcggtgcatggagccgggccacctcgacctga

SEQ ID NO: 200 - DNA, 65 bp, synthetic construct
  source 1..65: mol_type = other DNA
gaaaaaagacataccagggggcgctaatcggttgttgtagtgtgctcatttgcggtgttgactgg

SEQ ID NO: 201 - DNA, 65 bp, synthetic construct
  source 1..65: mol_type = other DNA
gtgcagtgctttggaaatggtcccctcgggggagttgtcattattttctatgctatttgcttatt

SEQ ID NO: 202 - DNA, 95 bp, synthetic construct
  source 1..95: mol_type = other DNA
tgcaaaaccagacagttccgcaaaccgccggcgaacaggccgtgctggcgcaacgtatcgttgacaagatctggcgcgatgcgatgagtgaataa

SEQ ID NO: 203 - DNA, 60 bp, synthetic construct
  source 1..60: mol_type = other DNA
attgggggcgattctctgcagcccccgtcactgctggggttgagtcatcttgacgtctgc

SEQ ID NO: 204 - DNA, 65 bp, synthetic construct
  source 1..65: mol_type = other DNA
gccgtctgcaggcgctctatctgcgcgagcagggctttaacaatgtgaaggtatatcgcccgtaa

SEQ ID NO: 205 - DNA, 66 bp, synthetic construct
  source 1..66: mol_type = other DNA
gataactaccggttgatccaagcttcctgacagagttatccacagtagatcgcacgatctgtatac

SEQ ID NO: 206 - DNA, 65 bp, synthetic construct
  source 1..65: mol_type = other DNA
aaaattgtaggccggacaaggcgctcgcgccgcatccggcattgttcatttgctgtagatgacac

SEQ ID NO: 207 - DNA, 65 bp, synthetic construct
  source 1..65: mol_type = other DNA
atggcttaattgataagctggcacgccagttgaccaaacataaagataaactgaaacaacactaa

SEQ ID NO: 208 - DNA, 64 bp, synthetic construct
  source 1..64: mol_type = other DNA
cctcgcataacgcggtatgaaaatggattgaagcccgggccgtggattctactcaactttgtcg

SEQ ID NO: 209 - DNA, 95 bp, synthetic construct
  source 1..95: mol_type = other DNA
taatggcggtcgtgctggcggggattgccgcgtacttcgctgcactggcggtactgggcttcaaagttaaagaatttgcccgccggacggtgtaa

SEQ ID NO: 210 - DNA, 65 bp, synthetic construct
  source 1..65: mol_type = other DNA
ctatgaatcaactacttagatggtattagtgacctgtagaagttcctattctctagaaagtatag

SEQ ID NO: 211 - DNA, 65 bp, synthetic construct
  source 1..65: mol_type = other DNA
ttttcgcttatcagaatcgtcggcggcgcttatctcttatggtttgcgtggtgcagcatgcgccg

SEQ ID NO: 212 - DNA, 65 bp, synthetic construct
  source 1..65: mol_type = other DNA
gttaaacactagcttaatagtggatatttcaaattaggaatttattaaattcacctgatgaatat

SEQ ID NO: 213 - DNA, 91 bp, synthetic construct
  source 1..91: mol_type = other DNA
ccacgggcaaaacgcctgcaaggcaggcgctgaaagaggcgaatagtctacctggattatggtgaattgctaccgccagatgttacagggt

SEQ ID NO: 214 - DNA, 60 bp, synthetic construct
  source 1..60: mol_type = other DNA
gtcaatgttatcgtttatatgcacttctggcgcacaagaggcaccttaaccgcccgtaaa

SEQ ID NO: 215 - DNA, 65 bp, synthetic construct
  source 1..65: mol_type = other DNA
tattacgagtaatgtcggatgcggcaaacgtcgcatctgaccagatgcgacgtaaaaaccacaaa

SEQ ID NO: 216 - DNA, 65 bp, synthetic construct
  source 1..65: mol_type = other DNA
atcacgacattccggaagatccggcagaagaatggctgggaagctgggttaatttactcaaataa

SEQ ID NO: 217 - DNA, 65 bp, synthetic construct
  source 1..65: mol_type = other DNA
ttattaccatgtacgaagaccagcagcctgataactggcgcgtacaggcgatactgtatgcatga

SEQ ID NO: 218 - DNA, 65 bp, synthetic construct
  source 1..65: mol_type = other DNA
aaccgtacaaatggcccgttgtgccgcacaacagaccgccatgcacatgctaattgcccggacaa

SEQ ID NO: 219 - DNA, 65 bp, synthetic construct
  source 1..65: mol_type = other DNA
tagaacagatctctaaataaatagatcttctttttaatacccaggatcccaggtctttctcaagc

SEQ ID NO: 220 - DNA, 91 bp, synthetic construct
  source 1..91: mol_type = other DNA
gaacggtcagacctcaacaccccatcgcggcagtaaaaagatttcgatctgaatattatctccggcctgcactgcaggccggaatgcattg

SEQ ID NO: 221 - DNA, 65 bp, synthetic construct
  source 1..65: mol_type = other DNA
atattcatcaggtgaatttaataaattcctaatttgaaatatccactattaagctagtgtttaac

SEQ ID NO: 222 - DNA, 60 bp, synthetic construct
  source 1..60: mol_type = other DNA
tttacgggcggttaaggtgcctcttgtgcgccagaagtgcatataaacgataacattgac

SEQ ID NO: 223 - DNA, 65 bp, synthetic construct
  source 1..65: mol_type = other DNA
aatgggcagcatagcttaatatgattcatgggctatacccccagatacttaagactcgtcctacc

SEQ ID NO: 224 - DNA, 65 bp, synthetic construct
  source 1..65: mol_type = other DNA
gcccacagtacggttgatgtcctatgcgctcctgataatgctagcgaacagtgggaggcaggtag

SEQ ID NO: 225 - DNA, 65 bp, synthetic construct
  source 1..65: mol_type = other DNA
ctccggttcgcgtggtattcactccccgcgcgtggacgctgggtgtttacttcggtctgattaac

SEQ ID NO: 226 - DNA, 65 bp, synthetic construct
  source 1..65: mol_type = other DNA
cgatcctgctgccggtgtggattgtattcctgtttatggcatttaaaacgctgcgtcggaaataa

SEQ ID NO: 227 - DNA, 65 bp, synthetic construct
  source 1..65: mol_type = other DNA
ggatggtgacgattacgcgcaatccggcaataataggttacagtgtcacgtttttttatctctta

SEQ ID NO: 228 - DNA, 96 bp, synthetic construct
  source 1..96: mol_type = other DNA
acctgatatgaaaggcaatgccaccacgccacaggttgccgacgcgatttgcaaaattattttgcgttaaggtcaaaccagtttatttgaaccgcg

SEQ ID NO: 229 - DNA, 65 bp, synthetic construct
  source 1..65: mol_type = other DNA
cgtgaactacagaatatattcaaccaagaaatagaataatatactctaaataattcaaattggtc

SEQ ID NO: 230 - DNA, 65 bp, synthetic construct
  source 1..65: mol_type = other DNA
tttctattaacgaaaaaaagcggaagaggtcgccctcttccgcttagtaacttgctacttaagcc

SEQ ID NO: 231 - DNA, 65 bp, synthetic construct
  source 1..65: mol_type = other DNA
ggtgtgaatataaaccccaaaccaccacggaagccggtttacgctggatggatccgtaccgttaa

SEQ ID NO: 232 - DNA, 65 bp, synthetic construct
  source 1..65: mol_type = other DNA
ctggctcgttggcctttggcaacgattatcctatgagattggggcaattacgcgccctcgtcaaa

SEQ ID NO: 233 - DNA, 96 bp, synthetic construct
  source 1..96: mol_type = other DNA
agagtggcgcattaggtgacccatgttgttccgtttagtcatgatgaaatattcaggtaaggggaattatcgttacgcattgagtgagggtatgcc

SEQ ID NO: 234 - DNA, 65 bp, synthetic construct
  source 1..65: mol_type = other DNA
taccttgagctgcagatgtatttggagaattacatcatggcgccacttcttccccaagttctagt

SEQ ID NO: 235 - DNA, 65 bp, synthetic construct
  source 1..65: mol_type = other DNA
ttacaatgggagatcggaaggtacgaattcggtctaccttcagcgtcgactggtcatgtagcgca

SEQ ID NO: 236 - DNA, 65 bp, synthetic construct
  source 1..65: mol_type = other DNA
tgcgcgctggcaccaatctcaatatagaaagcgggtaaccaggcaatcaggctggcgtaaccgcc

SEQ ID NO: 237 - DNA, 65 bp, synthetic construct
  source 1..65: mol_type = other DNA
tcatcgaatggatgagagcggtttcggatggttgacatcgttttgtcggatgtagcgtgaatgcc

SEQ ID NO: 238 - DNA, 65 bp, synthetic construct
  source 1..65: mol_type = other DNA
gggcaatgaaacacgggcgactattttgcggcaaaagaggccagccgcaaaagcagtgcgtgctt

SEQ ID NO: 239 - DNA, 97 bp, synthetic construct
  source 1..97: mol_type = other DNA
aatacggaaagccataaaacacgaaacggaaacaataaaaggtgaaatgacgcaggttatttactgcaaagaacgaataaaaaaaccgcgtcagtga

SEQ ID NO: 240 - DNA, 65 bp, synthetic construct
  source 1..65: mol_type = other DNA
ggaccccgttgcaattaagataatgagatttataatccaggccattgggacgttgcgccggatcg

SEQ ID NO: 241 - DNA, 65 bp, synthetic construct
  source 1..65: mol_type = other DNA
ttaactctctgactccggaacagcagcgcgacgttatcgctcgtacctttactgaaagcctgtaa

SEQ ID NO: 242 - DNA, 65 bp, synthetic construct
  source 1..65: mol_type = other DNA
tcagacaacacgatcccctgccaacttagcggcctaaaaaagcattgtctgaatagcgttacgtt

SEQ ID NO: 243 - DNA, 65 bp, synthetic construct
  source 1..65: mol_type = other DNA
gtccgctggacgatccgcaaatcaacgaagtgttgcgccaaccgcgtaaagaaaaagcgcaatga

SEQ ID NO: 244 - DNA, 97 bp, synthetic construct
  source 1..97: mol_type = other DNA
tgtcgttgatttctctttttttaacccctctactcaacagatacccggttaaacctagtcgggtgtaactacataaatccataataatcgttgacat

SEQ ID NO: 245 - DNA, 65 bp, synthetic construct
  source 1..65: mol_type = other DNA
aagcacgcactgcttttgcggctggcctcttttgccgcaaaatagtcgcccgtgtttcattgccc

SEQ ID NO: 246 - DNA, 65 bp, synthetic construct
  source 1..65: mol_type = other DNA
cgatccggcgcaacgtcccaatggcctggattataaatctcattatcttaattgcaacggggtcc

SEQ ID NO: 247 - DNA, 32 bp, synthetic construct
  source 1..32: mol_type = other DNA
accagacccgcgagcattaattcttgcctcca

SEQ ID NO: 248 - DNA, 32 bp, synthetic construct
  source 1..32: mol_type = other DNA
ttagcggaatgctggtacgggctgataaagaa

SEQ ID NO: 249 - DNA, 32 bp, synthetic construct
  source 1..32: mol_type = other DNA
agctgcaacaatgttgaaaatgccagccaact

SEQ ID NO: 250 - DNA, 32 bp, synthetic construct
  source 1..32: mol_type = other DNA
gttgtctgacacttgtcacaaaccgctaggag

SEQ ID NO: 251 - DNA, 32 bp, synthetic construct
  source 1..32: mol_type = other DNA
catattcttgagccacttcattataaagctca

SEQ ID NO: 252 - DNA, 32 bp, synthetic construct
  source 1..32: mol_type = other DNA
gcatagcggaggaagcttgcttattggatcag

SEQ ID NO: 253 - DNA, 32 bp, synthetic construct
  source 1..32: mol_type = other DNA
cacttaaagatgagaggaataccttttttggc

SEQ ID NO: 254 - DNA, 32 bp, synthetic construct
  source 1..32: mol_type = other DNA
ttgttaatgagcatgacaatcatgaccgccaa

SEQ ID NO: 255 - DNA, 32 bp, synthetic construct
  source 1..32: mol_type = other DNA
gtgctaaaggggaccgacgttgaccagcctcg

SEQ ID NO: 256 - DNA, 32 bp, synthetic construct
  source 1..32: mol_type = other DNA
aaaaccatgcaggcagttaaagacatcacgca

SEQ ID NO: 257 - DNA, 32 bp, synthetic construct
  source 1..32: mol_type = other DNA
tttaaagaagcaaaagccaaatacggtgtaat

SEQ ID NO: 258 - DNA, 32 bp, synthetic construct
  source 1..32: mol_type = other DNA
acaaatttaaaatctgagagggataggagact

SEQ ID NO: 259 - DNA, 32 bp, synthetic construct
  source 1..32: mol_type = other DNA
atgctttacacggaaggtacaccgggcacgat

SEQ ID NO: 260 - DNA, 32 bp, synthetic construct
  source 1..32: mol_type = other DNA
gttgcgagcggcattatcgcgatgcgggtttc

SEQ ID NO: 261 - DNA, 32 bp, synthetic construct
  source 1..32: mol_type = other DNA
aaagtgaagccattgaaatcattggcatgtcg

SEQ ID NO: 262 - DNA, 32 bp, synthetic construct
  source 1..32: mol_type = other DNA
gtcatgcaatttgtgttctcgccgatccttgg

SEQ ID NO: 263 - DNA, 32 bp, synthetic construct
  source 1..32: mol_type = other DNA
tggtggcggtggtgggagctattctcgttctg

SEQ ID NO: 264 - DNA, 32 bp, synthetic construct
  source 1..32: mol_type = other DNA
gaaaacacctgatatgaaaggcaatgccacca

SEQ ID NO: 265 - DNA, 32 bp, synthetic construct
  source 1..32: mol_type = other DNA
ggtattcgatggggaagaacttcacgcgagct

SEQ ID NO: 266 - DNA, 32 bp, synthetic construct
  source 1..32: mol_type = other DNA
aggagatggactacttcatggaagtatttgtt

SEQ ID NO: 267 - DNA, 32 bp, synthetic construct
  source 1..32: mol_type = other DNA
tggcggcctgtcagagctacgtcaaagaaatc

SEQ ID NO: 268 - DNA, 32 bp, synthetic construct
  source 1..32: mol_type = other DNA
ttccatcgcgcgttcaagaaatggaccggcga

SEQ ID NO: 269 - DNA, 32 bp, synthetic construct
  source 1..32: mol_type = other DNA
tggagtacgagacgttcatgctgtcgcgttga

SEQ ID NO: 270 - DNA, 32 bp, synthetic construct
  source 1..32: mol_type = other DNA
gttgcgacgcttagcagctctcaagcaagagg

SEQ ID NO: 271 - DNA, 32 bp, synthetic construct
  source 1..32: mol_type = other DNA
gatcaagagcaagttcggctatcacctggtgc

SEQ ID NO: 272 - DNA, 32 bp, synthetic construct
  source 1..32: mol_type = other DNA
tgctgggaggtttctacctgttgtggttgctg

SEQ ID NO: 273 - DNA, 32 bp, synthetic construct
  source 1..32: mol_type = other DNA
ttcaggccggcaagctccacaaggtcatcact

SEQ ID NO: 274 - DNA, 32 bp, synthetic construct
  source 1..32: mol_type = other DNA
gatcaaccgctgatcagcggttgcctgtgttg

SEQ ID NO: 275 - DNA, 32 bp, synthetic construct
  source 1..32: mol_type = other DNA
aacaagaactaccccaacgaggaacggatcaa

SEQ ID NO: 276 - DNA, 32 bp, synthetic construct
  source 1..32: mol_type = other DNA
tgggcctgaaaagaaagctcggcatgtacaag

SEQ ID NO: 277 - DNA, 32 bp, synthetic construct
  source 1..32: mol_type = other DNA
ttcggaccatgcgccgatctggctcgaactgg

SEQ ID NO: 278 - DNA, 32 bp, synthetic construct
  source 1..32: mol_type = other DNA
atcacctgcctggtggcctttgcggtgttcca

SEQ ID NO: 279 - DNA, 65 bp, synthetic construct
  source 1..65: mol_type = other DNA
gtcaggtctcgataacaccagacccgcgagcattaattcttgcctccagtgaacgagaccgatgc

SEQ ID NO: 280 - DNA, 65 bp, synthetic construct
  source 1..65: mol_type = other DNA
gtcaggtctcgataacttagcggaatgctggtacgggctgataaagaagtgaacgagaccgatgc

SEQ ID NO: 281 - DNA, 65 bp, synthetic construct
  source 1..65: mol_type = other DNA
gtcaggtctcgataacagctgcaacaatgttgaaaatgccagccaactgtgaacgagaccgatgc

SEQ ID NO: 282 - DNA, 65 bp, synthetic construct
  source 1..65: mol_type = other DNA
gtcaggtctcgataacgttgtctgacacttgtcacaaaccgctaggaggtgaacgagaccgatgc

SEQ ID NO: 283 - DNA, 65 bp, synthetic construct
  source 1..65: mol_type = other DNA
gtcaggtctcgataaccatattcttgagccacttcattataaagctcagtgaacgagaccgatgc

SEQ ID NO: 284 - DNA, 65 bp, synthetic construct
  source 1..65: mol_type = other DNA
gtcaggtctcgataacgcatagcggaggaagcttgcttattggatcaggtgaacgagaccgatgc

SEQ ID NO: 285 - DNA, 65 bp, synthetic construct
  source 1..65: mol_type = other DNA
gtcaggtctcgataaccacttaaagatgagaggaataccttttttggcgtgaacgagaccgatgc

SEQ ID NO: 286 - DNA, 65 bp, synthetic construct
  source 1..65: mol_type = other DNA
gtcaggtctcgataacttgttaatgagcatgacaatcatgaccgccaagtgaacgagaccgatgc

SEQ ID NO: 287 - DNA, 65 bp, synthetic construct
  source 1..65: mol_type = other DNA
gtcaggtctcgataacgtgctaaaggggaccgacgttgaccagcctcggtgaacgagaccgatgc

SEQ ID NO: 288 - DNA, 65 bp, synthetic construct
  source 1..65: mol_type = other DNA
gtcaggtctcgataacaaaaccatgcaggcagttaaagacatcacgcagtgaacgagaccgatgc

SEQ ID NO: 289 - DNA, 65 bp, synthetic construct
  source 1..65: mol_type = other DNA
gtcaggtctcgataactttaaagaagcaaaagccaaatacggtgtaatgtgaacgagaccgatgc

SEQ ID NO: 290 - DNA, 65 bp, synthetic construct
  source 1..65: mol_type = other DNA
gtcaggtctcgataacacaaatttaaaatctgagagggataggagactgtgaacgagaccgatgc

SEQ ID NO: 291 - DNA, 65 bp, synthetic construct
  source 1..65: mol_type = other DNA
gtcaggtctcgataacatgctttacacggaaggtacaccgggcacgatgtgaacgagaccgatgc

SEQ ID NO: 292 - DNA, 65 bp, synthetic construct
  source 1..65: mol_type = other DNA
gtcaggtctcgataacgttgcgagcggcattatcgcgatgcgggtttcgtgaacgagaccgatgc

SEQ ID NO: 293 - DNA, 65 bp, synthetic construct
  source 1..65: mol_type = other DNA
gtcaggtctcgataacaaagtgaagccattgaaatcattggcatgtcggtgaacgagaccgatgc

SEQ ID NO: 294 - DNA, 65 bp, synthetic construct
  source 1..65: mol_type = other DNA
gtcaggtctcgataacgtcatgcaatttgtgttctcgccgatccttgggtgaacgagaccgatgc

SEQ ID NO: 295 - DNA, 65 bp, synthetic construct
  source 1..65: mol_type = other DNA
gtcaggtctcgataactggtggcggtggtgggagctattctcgttctggtgaacgagaccgatgc

SEQ ID NO: 296 - DNA, 65 bp, synthetic construct
  source 1..65: mol_type = other DNA
gtcaggtctcgataacgaaaacacctgatatgaaaggcaatgccaccagtgaacgagaccgatgc

SEQ ID NO: 297 - DNA, 65 bp, synthetic construct
  source 1..65: mol_type = other DNA
gtcaggtctcaagaatggtattcgatggggaagaacttcacgcgagctgtaaccgagaccgatgc

SEQ ID NO: 298 - DNA, 65 bp, synthetic construct
  source 1..65: mol_type = other DNA
gtcaggtctctgaaataggagatggactacttcatggaagtatttgttgtgaacgagaccgatgc

SEQ ID NO: 299 - DNA, 65 bp, synthetic construct
  source 1..65: mol_type = other DNA
gtcaggtctcgaaaattggcggcctgtcagagctacgtcaaagaaatcgtgaccgagaccgatgc

SEQ ID NO: 300 - DNA, 65 bp, synthetic construct
  source 1..65: mol_type = other DNA
gtcaggtctctgaaatttccatcgcgcgttcaagaaatggaccggcgagtgaacgagaccgatgc

SEQ ID NO: 301 - DNA, 65 bp, synthetic construct
  source 1..65: mol_type = other DNA
gtcaggtctcgaaaattggagtacgagacgttcatgctgtcgcgttgagtgaccgagaccgatgc

SEQ ID NO: 302 - DNA, 65 bp, synthetic construct
  source 1..65: mol_type = other DNA
gtcaggtctctgaaatgttgcgacgcttagcagctctcaagcaagagggtgaacgagaccgatgc

SEQ ID NO: 303 - DNA, 65 bp, synthetic construct
  source 1..65: mol_type = other DNA
gtcaggtctcgaaaatgatcaagagcaagttcggctatcacctggtgcgtgaccgagaccgatgc

SEQ ID NO: 304 - DNA, 65 bp, synthetic construct
  source 1..65: mol_type = other DNA
gtcaggtctctgaaattgctgggaggtttctacctgttgtggttgctggtgaacgagaccgatgc

SEQ ID NO: 305 - DNA, 65 bp, synthetic construct
  source 1..65: mol_type = other DNA
gtcaggtctcgaaaatttcaggccggcaagctccacaaggtcatcactgtgaccgagaccgatgc

SEQ ID NO: 306 - DNA, 65 bp, synthetic construct
  source 1..65: mol_type = other DNA
gtcaggtctctgaaatgatcaaccgctgatcagcggttgcctgtgttggtgaacgagaccgatgc

SEQ ID NO: 307 - DNA, 65 bp, synthetic construct
  source 1..65: mol_type = other DNA
gtcaggtctcgaaaataacaagaactaccccaacgaggaacggatcaagtgaccgagaccgatgc

SEQ ID NO: 308 - DNA, 65 bp, synthetic construct
  source 1..65: mol_type = other DNA
gtcaggtctctgaaattgggcctgaaaagaaagctcggcatgtacaaggtgaacgagaccgatgc

SEQ ID NO: 309 - DNA, 65 bp, synthetic construct
  source 1..65: mol_type = other DNA
gtcaggtctcgaaaatttcggaccatgcgccgatctggctcgaactgggtgaccgagaccgatgc

SEQ ID NO: 310 - DNA, 65 bp, synthetic construct
  source 1..65: mol_type = other DNA
gtcaggtctctgaaatatcacctgcctggtggcctttgcggtgttccagtgaacgagaccgatgc

SEQ ID NO: 311 - DNA, 65 bp, synthetic construct
  source 1..65: mol_type = other DNA
gcatcggtctcgttcactggaggcaagaattaatgctcgcgggtctggtgttatcgagacctgac

SEQ ID NO: 312 - DNA, 65 bp, synthetic construct
  source 1..65: mol_type = other DNA
gcatcggtctcgttcacttctttatcagcccgtaccagcattccgctaagttatcgagacctgac

SEQ ID NO: 313 - DNA, 65 bp, synthetic construct
  source 1..65: mol_type = other DNA
gcatcggtctcgttcacagttggctggcattttcaacattgttgcagctgttatcgagacctgac

SEQ ID NO: 314 - DNA, 65 bp, synthetic construct
  source 1..65: mol_type = other DNA
gcatcggtctcgttcacctcctagcggtttgtgacaagtgtcagacaacgttatcgagacctgac

SEQ ID NO: 315 - DNA, 65 bp, synthetic construct
  source 1..65: mol_type = other DNA
gcatcggtctcgttcactgagctttataatgaagtggctcaagaatatggttatcgagacctgac

SEQ ID NO: 316 - DNA, 65 bp, synthetic construct
  source 1..65: mol_type = other DNA
gcatcggtctcgttcacctgatccaataagcaagcttcctccgctatgcgttatcgagacctgac

SEQ ID NO: 317 - DNA, 65 bp, synthetic construct
  source 1..65: mol_type = other DNA
gcatcggtctcgttcacgccaaaaaaggtattcctctcatctttaagtggttatcgagacctgac

SEQ ID NO: 318 - DNA, 65 bp, synthetic construct
  source 1..65: mol_type = other DNA
gcatcggtctcgttcacttggcggtcatgattgtcatgctcattaacaagttatcgagacctgac

SEQ ID NO: 319 - DNA, 65 bp, synthetic construct
  source 1..65: mol_type = other DNA
gcatcggtctcgttcaccgaggctggtcaacgtcggtcccctttagcacgttatcgagacctgac

SEQ ID NO: 320 - DNA, 65 bp, synthetic construct
  source 1..65: mol_type = other DNA
gcatcggtctcgttcactgcgtgatgtctttaactgcctgcatggttttgttatcgagacctgac

SEQ ID NO: 321 - DNA, 65 bp, synthetic construct
  source 1..65: mol_type = other DNA
gcatcggtctcgttcacattacaccgtatttggcttttgcttctttaaagttatcgagacctgac

SEQ ID NO: 322 - DNA, 65 bp, synthetic construct
  source 1..65: mol_type = other DNA
gcatcggtctcgttcacagtctcctatccctctcagattttaaatttgtgttatcgagacctgac

SEQ ID NO: 323 - DNA, 65 bp, synthetic construct
  source 1..65: mol_type = other DNA
gcatcggtctcgttcacatcgtgcccggtgtaccttccgtgtaaagcatgttatcgagacctgac

SEQ ID NO: 324 - DNA, 65 bp, synthetic construct
  source 1..65: mol_type = other DNA
gcatcggtctcgttcacgaaacccgcatcgcgataatgccgctcgcaacgttatcgagacctgac

SEQ ID NO: 325 - DNA, 65 bp, synthetic construct
  source 1..65: mol_type = other DNA
gcatcggtctcgttcaccgacatgccaatgatttcaatggcttcactttgttatcgagacctgac

SEQ ID NO: 326 - DNA, 65 bp, synthetic construct
  source 1..65: mol_type = other DNA
gcatcggtctcgttcacccaaggatcggcgagaacacaaattgcatgacgttatcgagacctgac

SEQ ID NO: 327 - DNA, 65 bp, synthetic construct
  source 1..65: mol_type = other DNA
gcatcggtctcgttcaccagaacgagaatagctcccaccaccgccaccagttatcgagacctgac

SEQ ID NO: 328 - DNA, 65 bp, synthetic construct
  source 1..65: mol_type = other DNA
gcatcggtctcgttcactggtggcattgcctttcatatcaggtgttttcgttatcgagacctgac

SEQ ID NO: 329 - DNA, 65 bp, synthetic construct
  source 1..65: mol_type = other DNA
gcatcggtctcggttacagctcgcgtgaagttcttccccatcgaataccattcttgagacctgac

SEQ ID NO: 330 - DNA, 65 bp, synthetic construct
  source 1..65: mol_type = other DNA
gcatcggtctcgttcacaacaaatacttccatgaagtagtccatctcctatttcagagacctgac

SEQ ID NO: 331 - DNA, 65 bp, synthetic construct
  source 1..65: mol_type = other DNA
gcatcggtctcggtcacgatttctttgacgtagctctgacaggccgccaattttcgagacctgac

SEQ ID NO: 332 - DNA, 65 bp, synthetic construct
  source 1..65: mol_type = other DNA
gcatcggtctcgttcactcgccggtccatttcttgaacgcgcgatggaaatttcagagacctgac

SEQ ID NO: 333 - DNA, 65 bp, synthetic construct
  source 1..65: mol_type = other DNA
gcatcggtctcggtcactcaacgcgacagcatgaacgtctcgtactccaattttcgagacctgac

SEQ ID NO: 334 - DNA, 65 bp, synthetic construct
  source 1..65: mol_type = other DNA
gcatcggtctcgttcaccctcttgcttgagagctgctaagcgtcgcaacatttcagagacctgac

SEQ ID NO: 335 - DNA, 65 bp, synthetic construct
  source 1..65: mol_type = other DNA
gcatcggtctcggtcacgcaccaggtgatagccgaacttgctcttgatcattttcgagacctgac

SEQ ID NO: 336 - DNA, 65 bp, synthetic construct
  source 1..65: mol_type = other DNA
gcatcggtctcgttcaccagcaaccacaacaggtagaaacctcccagcaatttcagagacctgac

SEQ ID NO: 337 - DNA, 65 bp, synthetic construct
  source 1..65: mol_type = other DNA
gcatcggtctcggtcacagtgatgaccttgtggagcttgccggcctgaaattttcgagacctgac

SEQ ID NO: 338 - DNA, 65 bp, synthetic construct
  source 1..65: mol_type = other DNA
gcatcggtctcgttcaccaacacaggcaaccgctgatcagcggttgatcatttcagagacctgac

SEQ ID NO: 339 - DNA, 65 bp, synthetic construct
  source 1..65: mol_type = other DNA
gcatcggtctcggtcacttgatccgttcctcgttggggtagttcttgttattttcgagacctgac

SEQ ID NO: 340 - DNA, 65 bp, synthetic construct
  source 1..65: mol_type = other DNA
gcatcggtctcgttcaccttgtacatgccgagctttcttttcaggcccaatttcagagacctgac

SEQ ID NO: 341 - DNA, 65 bp, synthetic construct
  source 1..65: mol_type = other DNA
gcatcggtctcggtcacccagttcgagccagatcggcgcatggtccgaaattttcgagacctgac

SEQ ID NO: 342 - DNA, 65 bp, synthetic construct
  source 1..65: mol_type = other DNA
gcatcggtctcgttcactggaacaccgcaaaggccaccaggcaggtgatatttcagagacctgac

SEQ ID NO: 343 - DNA, 250 bp, synthetic construct
  source 1..250: mol_type = other DNA
tgtcgctgcaaccatagtttgacataatgcaaccataccttgacataattaaagtcatactctgacataaagccccttattaaaaatgatgctaaaaataaattccattataatcaattatttaagaattaattaaaccatagtgtgacatagtggctttttatttgtatagtatgtgtactcaaataataaaaatttacttatgtatatacgcaacttaagaaagccatctccaaataaaaatgtattt

SEQ ID NO: 344 - DNA, 250 bp, synthetic construct
  source 1..250: mol_type = other DNA
tgttgtttgaagtataagttgacatatttgtactaaaagatggcataaattggaagtataaggtggcatagtctagtatttaaccaaatggttagatggttgactcacatgtacagaagaaaactcaaacactcccgtgttaaaaaccttcataaatttgctagtcaaaaaaataaatctacctgtttagttgaatcctctttagagtttgatgcctgttttcattttgaattttcaccatcaatagccg

SEQ ID NO: 345 - DNA, 250 bp, synthetic construct
  source 1..250: mol_type = other DNA
tgtcgctgcaagcaaagcgtgacatacactggataggcatatcaataacttacaaaaaacctgcaaccattcactgacataaaatgcaaccatacagtgacatagtgaaataaaagttataacgctaaaaacaaaaaaaccagcccggatataagactggttttttcaattactactcactgccttttcggcagaattacattaacttaaacatcgaatcgattgtttttatcttcagctgcctatacgg

SEQ ID NO: 346 - DNA, 250 bp, synthetic construct
  source 1..250: mol_type = other DNA
tgttgtttgaagtataagttgacataaccaaactcggttttattaacttacagcgtggtaagtgaagtgtatattggcatagtattgaagcaatagatggcataaagctaccaaatacagctttataaaacgcaaagtaaacatgctacgcgttgtaaatcactcttaaacagtttggaaaatggtttacactggcacaaaaactttgatgaataaatcatcaccttttactttaattggtaagtccatt

SEQ ID NO: 347 - protein, 203 aa, synthetic construct
MQRYYFTVHFLPKQANLALLTGRCISIMHGFILKHNIEGMGVTFPAWSDSSIGNEIAFVYTDKEILNTLKDQAYFVDMQDCGFFKVSQVLAVPDSCEEVRFIRNQAVAKIFTGESRRRLKRLQKRALARGEDFNPKKIEAPREIDIFHRVAMTSKSSQEDYILHIQKQDVDCQAEPYFSNYGLASNEKFKGTVPDLSPSIDRN

SEQ ID NO: 348 - protein, 199 aa, synthetic construct
MKRYYFTITYLPKNCDVSLLAGRCIGILHGFMSSREISNIGVCFPKWNEQEIGNELAFVSTDKKQLTNLSQQSYFEMMAQDKLFGLSKILEVPTNQNEVMFIRNQSVAKAFVGEKQRRLKRAKKRAEARGEVYNPEYQFEAKDIGHFHSIPVSSKANGQSYVLHIQKIENTNATENQFNNYGFATNQTFQGTVPSLNTQ

SEQ ID NO: 349 - protein, 350 aa, synthetic construct
MELCNILKYDRSLYPGKAVFFYKTADSDFVPLEADINKIRGPKSGFTEAFTPQFSPKNISPQDLTHNNILTLEECYVPPNVEHIFCRFSLRVQANSLVPSGCSDPEVFSLLKELAETFKECGGYKELAVRYCRNILIGTWLWRNQNTGNTQIEIKTSKGSCYLIDNTRKLAWESKWASDDLKVLEELSNEIESALTDPNVFWSADITAKIEASFCQEIYPSQILNDKVKQGEASKQFVKAKCADGRYAVSFNSVKIGAALQSIDDWWDEDASKRLRVHEFGADKEIGVARRPPDSEQNFYSIFKNTEWYLSALKNCITNKNEKIDPAIYYLFSVLIKGGMFQKKAEAKKA

SEQ ID NO: 350 - protein, 342 aa, synthetic construct
MQLPRHLSYTRSLSPSKAVFFYKTSESDFEPLQIEQNKLVGQKSGFGDAYQKQNVAKNLAPQDLAFGNPQTIDVCYVPPAVNELFCRFSLRVEANSNEPHVCDDPKVIYWLKRFFETYKKHNGLNEVATRYAKNILMGNWLWRNRQSPNVDIEILTEHAAPIIVEGAQKLKWQGNWQNNQTALITLSEAIQEGLSNPQNYCYLDITAKIKNAFSQEVHPSQKFVDNVEQGMSSKQLAYTQVGDKKAASLNSQKVGAAIQTIDDWYEGGYKPLRTHEYGADKQILVAHRTPKSHSDFYSLLPRIALHIKHMEKHGLEQSEESNAVHFIAAVLIKGGLFQRSKA

SEQ ID NO: 351 - protein, 708 aa, synthetic construct
MTKLECICRHGEYMHLKELLEITDTTERDRSLRRAFSPYTAMIDITGSEAVALIILLNLTYRKNQVDDLLDKKLAKQALKSEDHINKCIKEIAWFHTHNLKYPDIRVSKQNLAVEPPTLHSYVLSSANYPKAYGWSHNSAKVNFAKLFVSYFKWQNQVSWLAQVLATNSDNWKSAFTSLGLSVKAFKSLCVTVKNSLPEEAIPDSVDRYSRQIRMPYHDGYLAVTPVISHVVQSKIQQAAIDKRARFSNVEFTRPAAVSMLAASLGGVINVLNYPPYIRSKYHGLSNSRAFKLNNGQTVFNVEALLKPELIKALEGIIFSNNALALKQRRQQKVKNIKELRNTLLEWFSPVFEWRLDAIENGYDLEQLESASERLEYKILSLPDNELPSLTIPLFRLLNEMLGGVSMTQRYAFHPKLMSPLKAALQWLLVNLTDQKHVLIEEDDEHYRYLHLSGIRVFDAQALSNPYCSGIPSLTAVWGMIHSYQRKLNEALGTNVRFTSFSWFIRNYSAVAGKKLPELSLQGAQQSRLKRPGIIDGKYCDLVFDLIIHIDGYEDDLQAVDSKPDILKAHFPSNFAGGVMHQPELNSNINWCCLYSNENQLFEKLRRLPLSGCWVMPTEHKIQDLDELLLLLNSDSKLSPSMMGYMLLTEPMARVGSLERLHCYAEPAIGVVKYEAATSVRLKGIGNYFNSAFWMLDAQEKFMLMKKV

SEQ ID NO: 352 - protein, 683 aa, synthetic construct
MNLQDAFAIESLKEKTTALRKLFTPYMSHVAVDGFEEQALTVLINLVYKRSEIDDLTSTRTAKSVLRDEVLLSKCINEVKWFHTHNLKYPDIRVSHQRLISKVVSEDIAGICSRSLPLSFGWSHNSAEINHAKLFLTSFTWQGEVTCLANLLINEEPVWINLIRTYGFTKKAVLGIAGKIKQLLPVAELPLEVSSFSPQLQMPFQQSYLAVTPVVSHAMLAKIQQLTTDRKLNFGLVEHSRPANVGDLASSVGGNIRVLRYFPKTYSKAVNCSEVFNNDSEKAFKIRALLNSQFQQALLVLVGIKQFNTLRQKRLARVAAIRQVRVSLQLWLDNILEAKNNAQGQAYPEWAKHYLDQSITNCISQFSNVLNESLGNLSKLKRFAYHPNLMGVFKTQLNYVFTHCIPDEETLNDEQIVYVHCQDMRVFDAEAMANPYIQGMPSLTALNGLAHNFERKLKNFIDPSIKCIGSAINIESYQLHTGKPLPEPSKLKQVAGRSHVIRSGIIDKPKCDITLDLVFRLFVPNIKLLDKLNSQLVKPALPSMFAGGTMHPPSLYQNIDWCHLHTKPSELFKNIKAKSLNGSWLYPSKKVVKSFEQLIDALNGNFNLRPAAIGFAALEEPIKRDVALHEYHCYAEPVIGLLECVSNTSVKYAGAKQFFHDAFWVMDVQKESMLMKKSKFEYE

SEQ ID NO: 353 - protein, 409 aa, synthetic construct
MAFLFSPKARAFSDESLESYLLRVVSENFFDSYEGLSLAIREELHELDFEAHGAFPVDLKRLNVYHAKHNSHFRMRALGLLETLLDLPRYELQKLALLKSDIKFNSSVALYNNGVDIPLRFIRHHAEEAVDSIPVCSQCLAEEAYIKQSWHIKWVNACTKHQCALLHNCPECYAPINYIENESITHCSCGFELSCASTSPVNTLSIEHLNKLLDKGERNDSNPLFNNMTLTERFAALLWYQERYSQTDNFCLNDAVNYFSKWPAVFNTELDELSKNAEMKLIDLFNKTEFKFIFGDAILACPSTQKQSESHFIYRALLDYLVTLVESNPKTKKPNAADLLVSVLEAATLLGTSVEQVYRLYQNGILQTAFRHKMNQRINPYKGAFFLRHVIEYKTSFGNDKARMYLSAW

SEQ ID NO: 354 - protein, 391 aa, synthetic construct
MHFLVQTKLYPDEALESYLLRLARDNSYDGYSELADILWQWLVEQDHDLEGALPLELGKVDVYHARQASSFRIRALKLVAQLADVNAGNILALAWRRSNFKFGNLVAVSRNEQTIPLELLRTDNIPVCIECLFESSYVPFHWHLKPYKTCHKHKSQLTTHCKECHNLIDYRASEEFLECSCGCKLTNSEQLNDADFKIAFALASSNSHKIVGLISWFAKVKQLDVSDADFNRTFVDYFSTWPESLTTELDLLTNNARLKQLNPFNKTKFNSVYGNVIRDGQIAATSNRKNKVLDELIKYFVELVDSNPKTKHPNIADLLLCTFDTAVLLNTTTEQVYRLHQEGFLNCAYPQKKHEQLRADSHVFYLRQVIELQQAFAAETPQTKKQFIAPW

SEQ ID NO: 355 - protein, 209 aa, synthetic construct
MYIRNLRKPSPNKNVFKFASTKVSSVVMCESSLEFDACFHHEYNDLIESFGSQPEGFKYEFMGKSLPYTPDALISYTDKTQKYHEYKPYSKIASPLFRAEFAAKRAASLKLGIDLVLVTDRQIRVNPILNNLKLLHRYSGVYGISGIQKELLSFIHKSGVIKLNDISSQVGIPIGETRSFLFGLMHKGLVKADLGCDDLTNNPTLWATP

SEQ ID NO: 356 - protein, 209 aa, synthetic construct
MYRRKLKHSRVKNLHKFASQKNKSTCLVESSLEFDACFHFEFSPSIAAFEAQPLGYEYEFDNRICRYTPDFLLTHTDGTQKFIEVKPQSKIADEDFRARFIEKQTIAKQDGRDLILVTDKQIRVYPTLNNLKLLHRYSGFQSLTELQASVLELVKQYGSIKVGQLVNFLKVTAGELLATVLRLLSLGQLFADLTTNEISIETAIWSNNV

SEQ ID NO: 357 - protein, 617 aa, synthetic construct
MGYTMTDFFNEFDESLVPLKPQTPTQYVKLDDANLIQRDLDTFSDTFKNQALQRYKLISTIDKKLSRGWTQRNLDPILDELFKGGDVVRPNWRTVARWRKKYIESNGDIASLADKNHKMGNRTNRIKGDDKFFDKALERFLDAKRPTIATAYQYYKDLIVIENESIVEGKIPIISYNAFNKRIKAIPPYAVAVARHGKFKADQWFAYCAAHVPPTRILERVEIDHTPLDLILLDDELLIPIGRPYLTLLIDVFSGCVLGFHLSYKSPSYVSAAKAITHAIKPKSLDALNIELQNDWPCFGKFENLVVDNGAEFWSKNLEHACQSAGINIQYNPVRKPWLKPFIERFFGVMNEYFLPELPGKTFSNILEKEEYKPEKDAIMRFSTFVEEFHRWIADVYHQDSNSRETRIPIKRWQQGFDAYPPLTMNEEEETRFSMLMRISDSRTLTRNGFKYQELMYDSTALADYRKHYPQTKETVKKLIKVDPDDISKIYVYLEELESYLEVPCTDPTGYTDGLSIYEHKTIKKINREVIRESKDSLGLAKARMAIHERVKQEQEVFIESKTKAKITAVKKQAQIADVSNTGTSTIKVSEESAAPVQKHISNDNSDDWDDDLEAFE

SEQ ID NO: 358 - protein, 607 aa, synthetic construct
MFNDGLFDDEFNQPLPKVETKLPQNYAKDLQALPEKIKNTTFAKLKYIQWLEANIQGGWTQKNLEPLLKVMPEVEGEKKPSWRTAARWYSAYTNADKNIMALIPSHQKKGNRERDTATDKFFEKALERYLVKEKPSVASAYKYYADLVIIENDSVVGSVLKPLTYKAFKNRIDNLPQYDVMVSRYGKRLADIAFNKVEGHTRPTRVLEKVEIDHTPLDLILLDDELHIPLGRPTLTMLVDVYSHCIVGFYFSFSEPSYDAVRRAMLNAMKPKSDVAKLYPDTINEWKCAGKIETLVVDNGAEFWSNSLELACEEIGINTQYNPVAKPWLKPFVERMFGTINTELLDPVPGKTFSNILQKHEYNPKKDAIMRFTTFMQLFHKWVVDVYHQDADSRFKYIPSQLWEQGFNTLPPTVLSNADLQQLDVVLSISNHRVLRKGGIRLENLSYDSTELANYRKQFSHKVSQEVLIKLNPDDISYIYVYLDKLEHYIKVPCIDPNGYTQNLSLNQHKINIRIHRDFISGSIDNVGLAKARMFIHNKIQNEFEELKNAPKHSKVKGGKALAKHQNVSSDSQKSIAQSEPLEPKKVTPKEQPTDSWDDFISDLDGF

SEQ ID NO: 359 - protein, 333 aa, synthetic construct
MNALTEIQIEKLRNFSDCIVMHPQIKTIFNDFDELRLNRKFQSDQQCMLLIGDTGVGKSHTINHYKKRVLATQNYSRNTMPVLVSRISRGKGLDATLVQMLADLELFGSSQIKKRGYKTDLTKKLVESLIKAQVELLIINEFQELIEFKSVQERQQIANGLKFISEEAKVPIVLVGMPWAAKIAEEPQWASRLVRKRKLEYFSLKNDSKYFRQYLMGLAKKMPFDVPPKLESKNTTIALFAACRGENRALKHLLLEALKLALSCNEYLENKHFITAYDKFDFFNDKEKLKSKNPFKQDIKDIEIYEVIKNSSYNPNALDPEDMLTDRVFAIVK

SEQ ID NO: 360 - protein, 333 aa, synthetic construct
MLTDKQKAKLNEFRDVFIEYPIITTVFNDFDRLRLGKGLAGEKPCMLLNGDTGTGKTALIKQYKERHLPQFINGVMNHPVLVSRIPSNPTLESTLAELLKDLGQVGSTERKLRINGTRLTTSLIKCLKTCGTELIIIDEFQELIEHNQGKKRREIANRLKYINDEAGVSIVLVGMPWAEKIADEPQWSSRLLVRRQLPYFKLSENPKHFVQLIIGLANRMPFTEKPKLSEQATVFALFSLSKGCFRTLKYFLDDAVLYALMDNAKTLTTKHLVKAFGVLFPDVPNLFTLPVAEITASEVERYSLYKLESAQDEDPFIATKFTDQMPISQLLRK

SEQ ID NO: 361 - DNA, 125 bp, synthetic construct
  source 1..125: mol_type = other DNA
tgttgatacaaccataaaatgataattacacccataaattgataattatcacacccataaattgatattgcctcttcatggtctaaacttcagtaagtttacgacattttcctcgaggtcatttc

SEQ ID NO: 362 - DNA, 145 bp, synthetic construct
  source 1..145: mol_type = other DNA
tgttgatgcaaccataaagtgatatttaataattatttataatcagcaacttaaccacaaaacaaccatatattgatatctcacaaaacaaccataagttgatatttttgtgaatcgagtatttcagcaaaactactgcagtaag

SEQ ID NO: 363 - protein, 199 aa, synthetic construct
VKWYYKTITFLPELCNNESLAAKCLRVLHGFNYQYETRNIGVSFPLWCDATVGKKISFVSKNKIELDLLLKQHYFVQMEQLQYFHISNTVLVPEDCTYVSFRRCQSIDKLTAAGLARKIRRLEKRALSRGEQFDPSSFAQKEHTAIAHYHSLGESSKQTNRNFRLNIRMLSEQPREGNSIFSSYGLSNSENSFQPVPLI

SEQ ID NO: 364 - protein, 352 aa, synthetic construct
MKLPTNLAYERSIDPSDVCFFVVWPDDRKTPLTYNSRTLLGQMEAASLAYDVSGQPIKSATAEALAQGNPHQVDFCHVPYGASHIECSFSVSFSSELRQPYKCNSSKVKQTLVQLVELYETKIGWTELATRYLMNICNGKWLWKNTRKAYCWNIVLTPWPWNGEKVGFEDIRTNYTSRQDFKNNKNWSAIVEMIKTAFSSTDGLAIFEVRATLHLPTNAMVRPSQVFTEKESGSKSKSKTQNSRVFQSTTIDGERSPILGAFKTGAAIATIDDWYPEATEPLRVGRFGVHREDVTCYRHPSTGKDFFSILQQAEHYIEVLSANKTPAQETINDMHFLMANLIKGGMFQHKGD

SEQ ID NO: 365 - protein, 640 aa, synthetic construct
MQTLKELIASNPDDLTTELKRAFRPLTPHIAIDGNELDALTILVNLTDKTDDQKDLLDRAKCKQKLRDEKWWASCINCVNYRQSHNPKFPDIRSEGVIRTQALGELPSFLLSSSKIPPYHWSYSHDSKYVNKSAFLTNEFCWDGEISCLGELLKDADHPLWNTLKKLGCSQKTCKAMAKQLADITLTTINVTLAPNYLTQISLPDSDTSYISLSPVASLSMQSHFHQRLQDENRHSAITRFSRTTNMGVTAMTCGGAFRMLKSGAKFSSPPHHRLNSKRSWLTSEHVQSLKQYQRLNKSLIPENSRIALRRKYKIELQNMVRSWFAMQDHTLDSNILIQHLNHDLSYLGATKRFAYDPAMTKLFTELLKRELSNSINNGEQHTNGSFLVLPNIRVCGATALSSPVTVGIPSLTAFFGFVHAFERNINRTTSSFRVESFAICVHQLHVEKRGLTAEFVEKGDGTISAPATRDDWQCDVVFSLILNTNFAQHIDQDTLVTSLPKRLARGSAKIAIDDFKHINSFSTLETAIESLPIEAGRWLSLYAQSNNNLSDLLAAMTEDHQLMASCVGYHLLEEPKDKPNSLRGYKHAIAECIIGLINSITFSSETDPNTIFWSLKNYQNYLVVQPRSINDETTDKSSL

SEQ ID NO: 366 - protein, 394 aa, synthetic construct
MFLQRPKPYSDESLESFFIRVANKNGYGDVHRFLEATKRFLQDIDHNGYQTFPTDITRINPYSAKNSSSARTASFLKLAQLTFNEPPELLGLAINRTNMKYSPSTSAVVRGAEVFPRSLLRTHSIPCCPLCLRENGYASYLWHFQGYEYCHSHNVPLITTCSCGKEFDYRVSGLKGICCKCKEPITLTSRENGHEAACTVSNWLAGHESKPLPNLPKSYRWGLVHWWMGIKDSEFDHFSFVQFFSNWPRSFHSIIEDEVEFNLEHAVVSTSELRLKDLLGRLFFGSIRLPERNLQHNIILGELLCYLENRLWQDKGLIANLKMNALEATVMLNCSLDQIASMVEQRILKPNRKSKPNSPLDVTDYLFHFGDIFCLWLAEFQSDEFNRSFYVSRW

SEQ ID NO: 367 - protein, 230 aa, synthetic construct
MATSLPTPSAITTSALEYAFHTPARNLTKSRGKNIHRYVSVKMSKRITVESTLECDACYHFDFEPSIVRFCAQPIRFLYYLNGQSHSYVPDFLVQFDTNEFVLYEVKSAYAKNKPDFDVEWEAKVKAATELGLELELVEESDIRDTVVLNNLKRMHRYASKDELNNVHNSLLKIIKYNGAQSARCLGEQLGLKGRTVLPILCDLLSRCLLDTRLDKPLSLESRFELASYG

SEQ ID NO: 368 - protein, 603 aa, synthetic construct
MAKKGFSSFHRKAVSSQDTLESIELVSSANCLESVTYQDISAFPETIAVEINFRLSILRFLARKCETIVAKSIEPHRVELQQNYSRKIPSAITIYRWWLAFRKSDYNPISLAPNIKDRGNRETKVSTVVDSIMEQAVERVISGRKVNVSSAYKRVRRKVRQYNLTHGTKYTYPKYESVRKRVKKKTPFELLAAGKGERVAKREFRRMGKKILTSSVLERVEIDHTVVDLFAVHEEYRIPLGRPWLTQLVDCYSKAVIGFYLGFEPPSYVSVSLALKNAIQRKDDLISSYESIENEWLCYGIPDLLVTDNGKEFLSKAFDQACESLLINVHQNKVETPDNKPHVERNYGTINTSLLDDLPGKSFSQYLQREGYDSVGEATLTLNEIREIYLIWLVDIYHKKPNQRGTNCPNVAWKKGCQEWEPEEFSGSKDELDFKFAIVDYKQLTKVGITVYKELSYSNDRLAEYRGKKGNHKVQFKYNPECMAVIWVLDEDMNEYFTVNAIDYEYASRVSLWQHKYNMKYQAELNSAEYDEDKEIDAEIKIEEIADRSIVKTNKIRARRRGARHQENSARAKSISNANPASIQKHEDEIVSADNDDWDIDYV

SEQ ID NO: 369 - protein, 330 aa, synthetic construct
MSETREARISRAKRAFVSTPSVRKILSYMDRCRDLSDLESEPTCMMVYGASGVGKTTVIKKYLNQNRRESEAGGDIIPVLHIELPDNAKPVDAARELLVEMGDPLALYETDLARLTKRLTELIPAVGVKLIIIDEFQHLVEERSNRVLTQVGNWLKMILNKTKCPIVIFGMPYSKVVLQANSQLHGRFSIQVELRPFSYQGGRGVFKTFLEYLDKALPFEKQAGLANESLQKKLYAFSQGNMRSLRNLIYQASIEAIDNQHETITEEDFVFASKLTSGDKPNSWKNPFEEGVEVTEDMLRPPPKDIGWEDYLRHSTPRVSKPGRNKNFFE

SEQ ID NO: 370 - DNA, 2685 bp, synthetic construct
  source 1..2685: mol_type = other DNA
actaggagcacgtgttgacaattaatcatcggcatagtatatcggcatagtataatacgacaaggtgaggaactaaaccatgaacatcaaaaagtttgcaaaacaagcaacagtattaacctttactaccgcactgctggcaggaggcgcaactcaagcgtttgcgaaagaaacgaaccaaaagccatataaggaaacatacggcatttcccatattacacgccatgatatgctgcaaatccctgaacagcaaaaaaatgaaaaatataaagttcctgagttcgattcgtccacaattaaaaatatctcttctgcaaaaggcctggacgtttgggacagctggccattacaaaacactgacggcactgtcgcaaactatcacggctaccacatcgtctttgcattagccggagatcctaaaaatgcggatgacacatcgatttacatgttctatcaaaaagtcggcgaaacttctattgacagctggaaaaacgctggccgcgtctttaaagacagcgacaaattcgatgcaaatgattctatcctaaaagaccaaacacaagaatggtcaggttcagccacatttacatctgacggaaaaatccgtttattctacactgatttctccggtaaacattacggcaaacaaacactgacaactgcacaagttaacgtatcagcatcagacagctctttgaacatcaacggtgtagaggattataaatcaatctttgacggtgacggaaaaacgtatcaaaatgtacagcagttcatcgatgaaggcaactacagctcaggcgacaaccatacgctgagagatcctcactacgtagaagataaaggccacaaatacttagtatttgaagcaaacactggaactgaagatggctaccaaggcgaagaatctttatttaacaaagcatactatggcaaaagcacatcattcttccgtcaagaaagtcaaaaacttctgcaaagcgataaaaaacgcacggctgagttagcaaacggcgctctcggtatgattgagctaaacgatgattacacactgaaaaaagtgatgaaaccgctgattgcatctaacacagtaacagatgaaattgaacgcgcgaacgtctttaaaatgaacggcaaatggtacctgttcactgactcccgcggatcaaaaatgacgattgacggcattacgtctaacgatatttacatgcttggttatgtttctaattctttaactggcccatacaagccgctgaacaaaactggccttgtgttaaaaatggatcttgatcctaacgatgtaacctttacttactcacacttcgctgtacctcaagcgaaaggaaacaatgtcgtgattacaagctatatgacaaacagaggattctacgcagacaaacaatcaacgtttgcgcctagcttcctgctgaacatcaaaggcaagaaaacatctgttgtcaaagacagcatccttgaacaaggacaattaacagttaacaaataaggaggacaatcatggagaaaaaaatcactggatataccaccgttgatatatcccaatggcatcgtaaagaacattttgaggcatttcagtcagttgctcaatgtacctataaccagaccgttcagctggatattacggcctttttaaagaccgtaaagaaaaataagcacaagttttatccggcctttattcacattcttgcccgcctgatgaatgctcatccggaattccgtatggcaatgaaagacggtgagctggtgatatgggatagtgttcacccttgttacaccgttttccatgagcaaactgaaacgttttcatcgctctggagtgaataccacgacgatttccggcagtttctacacatatattcgcaagatgtggcgtgttacggtgaaaacctggcctatttccctaaagggtttattgagaatatgtttttcgtctcagccaatccctgggtgagtttcaccagttttgatttaaacgtggccaatatggacaacttcttcgcccccgttttcaccgtgggcaaatattatacgcaaggcgacaaggtgctgatgccgctggcgattcaggttcatcatgccgtctgtgatggcttccatgtcggcagaatgcttaatgaattacaacagtactgcgatgagtggcagggcggggcgtaatcgcgatatcagcacacaattgcccattatacgcgcgtataatggactattgtgtgctgataggatcctcatctgttacgccggcggtagccggccagcctcgcagagcaggattcccgttgagcaccgccaggtgcgaataagggacagtgaagaaggaacacccgctcgcgggtgggcctacttcacctatcctgcccggctgacgccgttggatacaccaaggaaagtctacacgaaccctttggcaaaatcctgtatatcgtgcgaaaaaggatggatataccgaaaaaatcgctataatgaccccgaagcagggttatgcagcggaaaagcgctctttgttgatacaaccataaaatgataattacacccataaattgataattatcacacccataaattgatattgcctcttcatggtctaaacttcagtaagtttacgacattttcctcgaggtcatttccggggatccgcgatcgcttctccttacgcatctgtgcggtatttca

SEQ ID NO: 371 - DNA, 3656 bp, synthetic construct
  source 1..3656: mol_type = other DNA
tcgcgagccccaactggggtaacctttgagttctctcagttgggggagcacgtgttgacaattaatcatcggcatagtatatcggcatagtataatacgacaaggtgaggaactaaaccatgtcacatctcgcagaactggttgccagtgcgaaggcggccattagccaggcgtcagatgttgccgcgttagataatgtgcgcgtcgaatatttgggtaaaaaagggcacttaacccttcagatgacgaccctgcgtgagctgccgccagaagagcgtccggcagctggtgcggttatcaacgaagcgaaagagcaggttcagcaggcgctgaatgcgcgtaaagcggaactggaaagcgctgcactgaatgcgcgtctggcggcggaaacgattgatgtctctctgccaggtcgtcgcattgaaaacggcggtctgcatccggttacccgtaccatcgaccgtatcgaaagtttcttcggtgagcttggctttaccgtggcaaccgggccggaaatcgaagacgattatcataacttcgatgctctgaacattcctggtcaccacccggcgcgcgctgaccacgacactttctggtttgacactacccgcctgctgcgtacccagacctctggcgtacagatccgcaccatgaaagcccagcagccaccgattcgtatcatcgcgcctggccgtgtttatcgtaacgactacgaccagactcacacgccgatgttccatcagatggaaggtctgattgttgataccaacatcagctttaccaacctgaaaggcacgctgcacgacttcctgcgtaacttctttgaggaagatttgcagattcgcttccgtccttcctacttcccgtttgccgaaccttctgcagaagtggacgtcatgggtaaaaacggtaaatggctggaagtgctgggctgcgggatggtgcatccgaacgtgttgcgtaacgttggcatcgacccggaagtttactctggtttcggcttcgggatggggatggagcgtctgactatgttgcgttacggcgtcaccgacctgcgttcattcttcgaaaacgatctgcgtttcctcaaacagtttaaataaggaggacaatcatgaaaaagcctgaactcaccgcgacgtctgtcgagaagtttctgatcgaaaagttcgacagcgtctccgacctgatgcagctctcggagggcgaagaatctcgtgctttcagcttcgatgtaggagggcgtggatatgtcctgcgggtaaatagctgcgccgatggtttctacaaagatcgttatgtttatcggcactttgcatcggccgcgctcccgattccggaagtgcttgacattggggaattcagcgagagcctgacctattgcatctcccgccgtgcacagggtgtcacgttgcaagacctgcctgaaaccgaactgcccgctgttctgcagccggtcgcggaggccatggatgcgatcgctgcggccgatcttagccagacgagcgggttcggcccattcggaccgcaaggaatcggtcaatacactacatggcgtgatttcatatgcgcgattgctgatccccatgtgtatcactggcaaactgtgatggacgacaccgtcagtgcgtccgtcgcgcaggctctcgatgagctgatgctttgggccgaggactgccccgaagtccggcacctcgtgcacgcggatttcggctccaacaatgtcctgacggacaatggccgcataacagcggtcattgactggagcgaggcgatgttcggggattcccaatacgaggtcgccaacatcttcttctggaggccgtggttggcttgtatggagcagcagacgcgctacttcgagcggaggcatccggagcttgcaggatcgccgcggctccgggcgtatatgctccgcattggtcttgaccaactctatcagagcttggttgacggcaatttcgatgatgcagcttgggcgcagggtcgatgcgacgcaatcgtccgatccggagccgggactgtcgggcgtacacaaatcgcccgcagaagcgcggccgtctggaccgatggctgtgtagaagtacttgccgatagtggaaaccgacgccccagcactcgtccgagggcaaaggaataacctaggctcgagtaatggtttcttagacgtcttgacagctagctcagtcctaggtataatgctagcctgtcaccggatgtgctttccggtctgatgagtccgtgaggacgaaacagcctctacaaataattttgtttaatactagagaaagaggggaaatactagatggtgtcgaaaggtgaggagcttttcacgggggtggttccaatcttagtcgagcttgatggtgacgtgaatggccataagtttagcgtgcgcggcgagggtgagggcgatgcgacgaacggtaaacttactttaaagtttatttgtactacaggcaaattaccggtcccgtggccgaccctggtcactacgcttgggtatggggtagcatgttttgcccgttaccctgaccacatgaaacagcacgatttctttaaatctgccatgcccgaagggtatgttcaggagcgcactatcagttttaaagacgacggaacgtacaaaactcgtgctgaagtaaagttcgaaggtgatacccttgtgaaccgtatcgtccttaaaggcatcgacttcaaagaggacggtaacattttaggccacaaattagagtacaacttcaattcacataaggtttatatcacagcagataagcaaaaaaatggcatcaaggcaaattttaagacccgccacaacgtagaagatggtggagtccagttggcggaccactaccagcaaaatacaccgattggcgatggtccggttttgcttcccgacaatcactatcttagccaccagagtaaactgagtaaggacccaaatgaaaagcgcgaccacatggtattgaaagagcgcgttacagcagctggaattacacacgatatggacgaactttataagtaatagggataacagggtaatcgcaaaaaaccccgcttcggcggggttttttcgcgtttaaacgtgccagggcgtgcccttgggctccccgggcgcgttttttacgcgttctagagtccttactgcagtagttttgctgaaatactcgattcacaaaaatatcaacttatggttgttttgtgagatatcaatatatggttgttttgtggttaagttgctgattataaataattattaaatatcactttatggttgcatcaacaggtaccgagctctcatctgttacgctcggcgtgtagccggccagcctcgcagagcaggattcccgttgagcaccgccaggtgcgaataagggacagtgaagaaggaacacccgctcgcgggtgggcctacttcacctatcctgcccggctgatcgccgttggatacaccaaggaaagtctacacgaaccctttggcaaaatcctgtatatcgtgcgaaaaaggatggatataccgaaaaaatcgctataatgaccccgaagcagggttatgcagcggaaaagcgcttatcagcacacaattgcccattatacgcgcgtataatggactattgtgtgctgatattctccttacgcatctgtgcggtatttca

SEQ ID NO: 372 - DNA, 3708 bp, synthetic construct
  source 1..3708: mol_type = other DNA
tgtcgctgcaaccatagtttgacataatgcaaccataccttgacataattaaagtcatactctgacataaagccccttattaaaaatgatgctaaaaataaattccattataatcaattatttaagaattaattaaaccatagtgtgacatagtggctttttatttgtatagtatgtgtactcaaataataaaaatttacttatgtatatacgcaacttaagaaagccatctccaaataaaaatgtatttaagaggcagtccctcttagaggatcctactaggagcacgtgttgacaattaatcatcggcatagtatatcggcatagtataatacgacaaggtgaggaactaaaccatgaacatcaaaaagtttgcaaaacaagcaacagtattaacctttactaccgcactgctggcaggaggcgcaactcaagcgtttgcgaaagaaacgaaccaaaagccatataaggaaacatacggcatttcccatattacacgccatgatatgctgcaaatccctgaacagcaaaaaaatgaaaaatataaagttcctgagttcgattcgtccacaattaaaaatatctcttctgcaaaaggcctggacgtttgggacagctggccattacaaaacactgacggcactgtcgcaaactatcacggctaccacatcgtctttgcattagccggagatcctaaaaatgcggatgacacatcgatttacatgttctatcaaaaagtcggcgaaacttctattgacagctggaaaaacgctggccgcgtctttaaagacagcgacaaattcgatgcaaatgattctatcctaaaagaccaaacacaagaatggtcaggttcagccacatttacatctgacggaaaaatccgtttattctacactgatttctccggtaaacattacggcaaacaaacactgacaactgcacaagttaacgtatcagcatcagacagctctttgaacatcaacggtgtagaggattataaatcaatctttgacggtgacggaaaaacgtatcaaaatgtacagcagttcatcgatgaaggcaactacagctcaggcgacaaccatacgctgagagatcctcactacgtagaagataaaggccacaaatacttagtatttgaagcaaacactggaactgaagatggctaccaaggcgaagaatctttatttaacaaagcatactatggcaaaagcacatcattcttccgtcaagaaagtcaaaaacttctgcaaagcgataaaaaacgcacggctgagttagcaaacggcgctctcggtatgattgagctaaacgatgattacacactgaaaaaagtgatgaaaccgctgattgcatctaacacagtaacagatgaaattgaacgcgcgaacgtctttaaaatgaacggcaaatggtacctgttcactgactcccgcggatcaaaaatgacgattgacggcattacgtctaacgatatttacatgcttggttatgtttctaattctttaactggcccatacaagccgctgaacaaaactggccttgtgttaaaaatggatcttgatcctaacgatgtaacctttacttactcacacttcgctgtacctcaagcgaaaggaaacaatgtcgtgattacaagctatatgacaaacagaggattctacgcagacaaacaatcaacgtttgcgcctagcttcctgctgaacatcaaaggcaagaaaacatctgttgtcaaagacagcatccttgaacaaggacaattaacagttaacaaataaggaggacaatcatgaaatctaacaatgcgctcatcgtcatcctcggcaccgtcaccctggatgctgtaggcataggcttggttatgccggtactgccgggcctcttgcgggatatcgtccattccgacagcatcgccagtcactatggcgtgctgctagcgctatatgcgttgatgcaatttctatgcgcacccgttctcggagcactgtccgaccgctttggccgccgcccagtcctgctcgcttcgctacttggagccactatcgactacgcgatcatggcgaccacacccgtcctgtggatcctctacgccggacgcatcgtggccggcatcaccggcgccacaggtgcggttgctggcgcctatatcgccgacatcaccgatggggaagatcgggctcgccacttcgggctcatgagcgcttgtttcggcgtgggtatggtggcaggccccgtggccgggggactgttgggcgccatctccttgcatgcaccattccttgcggcggcggtgctcaacggcctcaacctactactgggctgcttcctaatgcaggagtcgcataagggagagcgtcgaccgatgcccttgagagccttcaacccagtcagctccttccggtgggcgcggggcatgactatcgtcgccgcacttatgactgtcttctttatcatgcaactcgtaggacaggtgccggcagcgctctgggtcattttcggcgaggaccgctttcgctggagcgcgacgatgatcggcctgtcgcttgcggtattcggaatcttgcacgccctcgctcaagccttcgtcactggtcccgccaccaaacgtttcggcgagaagcaggccattatcgccggcatggcggccgacgcgctgggctacgtcttgctggcgttcgcgacgcgaggctggatggccttccccattatgattcttctcgcttccggcggcatcgggatgcccgcgttgcaggccatgctgtccaggcaggtagatgacgaccatcagggacagcttcaaggatcgctcgcggctcttaccagcctaacttcgatcactggaccgctgatcgtcacggcgatttatgccgcctcggcgagcacatggaacgggttggcatggattgtaggcgccgccctataccttgtctgcctccccgcgttgcgtcgcggtgcatggagccgggccacctcgacctgatgtccgatcatctgttacgccggcggtagccggccagcctcgcagagcaggattcccgttgagcaccgccaggtgcgaataagggacagtgaagaaggaacacccgctcgcgggtgggcctacttcacctatcctgcccggctgacgccgttggatacaccaaggaaagtctacacgaaccctttggcaaaatcctgtatatcgtgcgaaaaaggatggatataccgaaaaaatcgctataatgaccccgaagcagggttatgcagcggaaaagcgctctttgttgatacaaccataaaatgataattacacccataaattgataattatcacacccataaattgatattgcctcttcatggtctaaacttcagtaagtttacgacattttcctcgaggtcatttccggggatccgcgatcgcttctccttacgcatctgtgcggtatttcaggtaccctgcccaagtcttatgaatgccgtataggcagctgaagataaaaacaatcgattcgatgtttaagttaatgtaattctgccgaaaaggcagtgagtagtaattgaaaaaaccagtcttatatccgggctggtttttttgtttttagcgttataacttttatttcactatgtcactgtatggttgcattttatgtcagtgaatggttgcaggttttttgtaagttattgatatgcctatccagtgtatgtcacgctttgcttgcagcgaca

SEQ ID NO: 373 - DNA, 3238 bp, synthetic construct
  source 1..3238: mol_type = other DNA
tgtcgctgcaaccatagtttgacataatgcaaccataccttgacataattaaagtcatactctgacataaagccccttattaaaaatgatgctaaaaataaattccattataatcaattatttaagaattaattaaaccatagtgtgacatagtggctttttatttgtatagtatgtgtactcaaataataaaaatttacttatgtatatacgcaacttaagaaagccatctccaaataaaaatgtatttacgcccctatccattttagcggatcctactaggagcacgtgttgacaattaatcatcggcatagtatatcggcatagtataatacgacaaggtgaggaactaaaccatgaacatcaaaaagtttgcaaaacaagcaacagtattaacctttactaccgcactgctggcaggaggcgcaactcaagcgtttgcgaaagaaacgaaccaaaagccatataaggaaacatacggcatttcccatattacacgccatgatatgctgcaaatccctgaacagcaaaaaaatgaaaaatataaagttcctgagttcgattcgtccacaattaaaaatatctcttctgcaaaaggcctggacgtttgggacagctggccattacaaaacactgacggcactgtcgcaaactatcacggctaccacatcgtctttgcattagccggagatcctaaaaatgcggatgacacatcgatttacatgttctatcaaaaagtcggcgaaacttctattgacagctggaaaaacgctggccgcgtctttaaagacagcgacaaattcgatgcaaatgattctatcctaaaagaccaaacacaagaatggtcaggttcagccacatttacatctgacggaaaaatccgtttattctacactgatttctccggtaaacattacggcaaacaaacactgacaactgcacaagttaacgtatcagcatcagacagctctttgaacatcaacggtgtagaggattataaatcaatctttgacggtgacggaaaaacgtatcaaaatgtacagcagttcatcgatgaaggcaactacagctcaggcgacaaccatacgctgagagatcctcactacgtagaagataaaggccacaaatacttagtatttgaagcaaacactggaactgaagatggctaccaaggcgaagaatctttatttaacaaagcatactatggcaaaagcacatcattcttccgtcaagaaagtcaaaaacttctgcaaagcgataaaaaacgcacggctgagttagcaaacggcgctctcggtatgattgagctaaacgatgattacacactgaaaaaagtgatgaaaccgctgattgcatctaacacagtaacagatgaaattgaacgcgcgaacgtctttaaaatgaacggcaaatggtacctgttcactgactcccgcggatcaaaaatgacgattgacggcattacgtctaacgatatttacatgcttggttatgtttctaattctttaactggcccatacaagccgctgaacaaaactggccttgtgttaaaaatggatcttgatcctaacgatgtaacctttacttactcacacttcgctgtacctcaagcgaaaggaaacaatgtcgtgattacaagctatatgacaaacagaggattctacgcagacaaacaatcaacgtttgcgcctagcttcctgctgaacatcaaaggcaagaaaacatctgttgtcaaagacagcatccttgaacaaggacaattaacagttaacaaataaggaggacaatcatggagaaaaaaatcactggatataccaccgttgatatatcccaatggcatcgtaaagaacattttgaggcatttcagtcagttgctcaatgtacctataaccagaccgttcagctggatattacggcctttttaaagaccgtaaagaaaaataagcacaagttttatccggcctttattcacattcttgcccgcctgatgaatgctcatccggaattccgtatggcaatgaaagacggtgagctggtgatatgggatagtgttcacccttgttacaccgttttccatgagcaaactgaaacgttttcatcgctctggagtgaataccacgacgatttccggcagtttctacacatatattcgcaagatgtggcgtgttacggtgaaaacctggcctatttccctaaagggtttattgagaatatgtttttcgtctcagccaatccctgggtgagtttcaccagttttgatttaaacgtggccaatatggacaacttcttcgcccccgttttcaccgtgggcaaatattatacgcaaggcgacaaggtgctgatgccgctggcgattcaggttcatcatgccgtctgtgatggcttccatgtcggcagaatgcttaatgaattacaacagtactgcgatgagtggcagggcggggcgtaatcgcgatatcagcacacaattgcccattatacgcgcgtataatggactattgtgtgctgataggatcctcatctgttacgccggcggtagccggccagcctcgcagagcaggattcccgttgagcaccgccaggtgcgaataagggacagtgaagaaggaacacccgctcgcgggtgggcctacttcacctatcctgcccggctgacgccgttggatacaccaaggaaagtctacacgaaccctttggcaaaatcctgtatatcgtgcgaaaaaggatggatataccgaaaaaatcgctataatgaccccgaagcagggttatgcagcggaaaagcgctctttgttgatacaaccataaaatgataattacacccataaattgataattatcacacccataaattgatattgcctcttcatggtctaaacttcagtaagtttacgacattttcctcgaggtcatttccggggatccgcgatcgcttctccttacgcatctgtgcggtatttcaggtaccgagacgggtttaaggaggaaccgtataggcagctgaagataaaaacaatcgattcgatgtttaagttaatgtaattctgccgaaaaggcagtgagtagtaattgaaaaaaccagtcttatatccgggctggtttttttgtttttagcgttataacttttatttcactatgtcactgtatggttgcattttatgtcagtgaatggttgcaggttttttgtaagttattgatatgcctatccagtgtatgtcacgctttgcttgcagcgaca

SEQ ID NO: 374 - DNA, 3895 bp, synthetic construct
  source 1..3895: mol_type = other DNA
tgttgtttgaagtataagttgacatatttgtactaaaagatggcataaattggaagtataaggtggcatagtctagtatttaaccaaatggttagatggttgactcacatgtacagaagaaaactcaaacactcccgtgttaaaaaccttcataaatttgctagtcaaaaaaataaatctacctgtttagttgaatcctctttagagtttgatgcctgttttcattttgaattttcaccatcaatagccgattagacggacgcaatcttgggatccgagccccaactggggtaacctttgagttctctcagttgggggagcacgtgttgacaattaatcatcggcatagtatatcggcatagtataatacgacaaggtgaggaactaaaccatgtcacatctcgcagaactggttgccagtgcgaaggcggccattagccaggcgtcagatgttgccgcgttagataatgtgcgcgtcgaatatttgggtaaaaaagggcacttaacccttcagatgacgaccctgcgtgagctgccgccagaagagcgtccggcagctggtgcggttatcaacgaagcgaaagagcaggttcagcaggcgctgaatgcgcgtaaagcggaactggaaagcgctgcactgaatgcgcgtctggcggcggaaacgattgatgtctctctgccaggtcgtcgcattgaaaacggcggtctgcatccggttacccgtaccatcgaccgtatcgaaagtttcttcggtgagcttggctttaccgtggcaaccgggccggaaatcgaagacgattatcataacttcgatgctctgaacattcctggtcaccacccggcgcgcgctgaccacgacactttctggtttgacactacccgcctgctgcgtacccagacctctggcgtacagatccgcaccatgaaagcccagcagccaccgattcgtatcatcgcgcctggccgtgtttatcgtaacgactacgaccagactcacacgccgatgttccatcagatggaaggtctgattgttgataccaacatcagctttaccaacctgaaaggcacgctgcacgacttcctgcgtaacttctttgaggaagatttgcagattcgcttccgtccttcctacttcccgtttgccgaaccttctgcagaagtggacgtcatgggtaaaaacggtaaatggctggaagtgctgggctgcgggatggtgcatccgaacgtgttgcgtaacgttggcatcgacccggaagtttactctggtttcggcttcgggatggggatggagcgtctgactatgttgcgttacggcgtcaccgacctgcgttcattcttcgaaaacgatctgcgtttcctcaaacagtttaaataaggaggacaatcatgattgaacaagatggattgcacgcaggttctccggccgcttgggtggagaggctattcggctatgactgggcacaacagacaatcggctgctctgatgccgccgtgttccggctgtcagcgcaggggcgcccggttctttttgtcaagaccgacctgtccggtgccctgaatgaactgcaggacgaggcagcgcggctatcgtggctggccacgacgggcgttccttgcgcagctgtgctcgacgttgtcactgaagcgggaagggactggctgctattgggcgaagtgccggggcaggatctcctgtcatctcaccttgctcctgccgagaaagtatccatcatggctgatgcaatgcggcggctgcatacgcttgatccggctacctgcccattcgaccaccaagcgaaacatcgcatcgagcgagcacgtactcggatggaagccggtcttgtcgatcaggatgatctggacgaagagcatcaggggctcgcgccagccgaactgttcgccaggctcaaggcgcgcatgcccgacggcgaggatctcgtcgtgacccatggcgatgcctgcttgccgaatatcatggtggaaaatggccgcttttctggattcatcgactgtggccggctgggtgtggcggaccgctatcaggacatagcgttggctacccgtgatattgctgaagagcttggcggcgaatgggctgaccgcttcctcgtgctttacggtatcgccgctcccgattcgcagcgcatcgccttctatcgccttcttgacgagttcttctgacctaggctcgagtaatggtttcttagacgtcttgacagctagctcagtcctaggtataatgctagcctgtcaccggatgtgctttccggtctgatgagtccgtgaggacgaaacagcctctacaaataattttgtttaatactagagaaagaggggaaatactagatggtgtcgaaaggtgaggagcttttcacgggggtggttccaatcttagtcgagcttgatggtgacgtgaatggccataagtttagcgtgcgcggcgagggtgagggcgatgcgacgaacggtaaacttactttaaagtttatttgtactacaggcaaattaccggtcccgtggccgaccctggtcactacgcttgggtatggggtagcatgttttgcccgttaccctgaccacatgaaacagcacgatttctttaaatctgccatgcccgaagggtatgttcaggagcgcactatcagttttaaagacgacggaacgtacaaaactcgtgctgaagtaaagttcgaaggtgatacccttgtgaaccgtatcgtccttaaaggcatcgacttcaaagaggacggtaacattttaggccacaaattagagtacaacttcaattcacataaggtttatatcacagcagataagcaaaaaaatggcatcaaggcaaattttaagacccgccacaacgtagaagatggtggagtccagttggcggaccactaccagcaaaatacaccgattggcgatggtccggttttgcttcccgacaatcactatcttagccaccagagtaaactgagtaaggacccaaatgaaaagcgcgaccacatggtattgaaagagcgcgttacagcagctggaattacacacgatatggacgaactttataagtaatagggataacagggtaatcgcaaaaaaccccgcttcggcggggttttttcgcgtttaaacgtgccagggcgtgcccttgggctccccgggcgcgttttttacgcgttctagagtccttactgcagtagttttgctgaaatactcgattcacaaaaatatcaacttatggttgttttgtgagatatcaatatatggttgttttgtggttaagttgctgattataaataattattaaatatcactttatggttgcatcaacaggtaccgagctctcatctgttacgctcggcgtgtagccggccagcctcgcagagcaggattcccgttgagcaccgccaggtgcgaataagggacagtgaagaaggaacacccgctcgcgggtgggcctacttcacctatcctgcccggctgatcgccgttggatacaccaaggaaagtctacacgaaccctttggcaaaatcctgtatatcgtgcgaaaaaggatggatataccgaaaaaatcgctataatgaccccgaagcagggttatgcagcggaaaagcgcttatcagcggtaccggtagctcggctgtgaatgaaatggacttaccaattaaagtaaaaggtgatgatttattcatcaaagtttttgtgccagtgtaaaccattttccaaactgtttaagagtgatttacaacgcgtagcatgtttactttgcgttttataaagctgtatttggtagctttatgccatctattgcttcaatactatgccaatatacacttcacttaccacgctgtaagttaataaaaccgagtttggttatgtcaacttatacttcaaacaaca

SEQ ID NO: 375 - DNA, 4126 bp, synthetic construct
  source 1..4126: mol_type = other DNA
tgttgtttgaagtataagttgacatatttgtactaaaagatggcataaattggaagtataaggtggcatagtctagtatttaaccaaatggttagatggttgactcacatgtacagaagaaaactcaaacactcccgtgttaaaaaccttcataaatttgctagtcaaaaaaataaatctacctgtttagttgaatcctctttagagtttgatgcctgttttcattttgaattttcaccatcaatagccgattagacggacgcaatcttgggatccgagccccaactggggtaacctttgagttctctcagttgggggagcacgtgttgacaattaatcatcggcatagtatatcggcatagtataatacgacaaggtgaggaactaaaccatgtcacatctcgcagaactggttgccagtgcgaaggcggccattagccaggcgtcagatgttgccgcgttagataatgtgcgcgtcgaatatttgggtaaaaaagggcacttaacccttcagatgacgaccctgcgtgagctgccgccagaagagcgtccggcagctggtgcggttatcaacgaagcgaaagagcaggttcagcaggcgctgaatgcgcgtaaagcggaactggaaagcgctgcactgaatgcgcgtctggcggcggaaacgattgatgtctctctgccaggtcgtcgcattgaaaacggcggtctgcatccggttacccgtaccatcgaccgtatcgaaagtttcttcggtgagcttggctttaccgtggcaaccgggccggaaatcgaagacgattatcataacttcgatgctctgaacattcctggtcaccacccggcgcgcgctgaccacgacactttctggtttgacactacccgcctgctgcgtacccagacctctggcgtacagatccgcaccatgaaagcccagcagccaccgattcgtatcatcgcgcctggccgtgtttatcgtaacgactacgaccagactcacacgccgatgttccatcagatggaaggtctgattgttgataccaacatcagctttaccaacctgaaaggcacgctgcacgacttcctgcgtaacttctttgaggaagatttgcagattcgcttccgtccttcctacttcccgtttgccgaaccttctgcagaagtggacgtcatgggtaaaaacggtaaatggctggaagtgctgggctgcgggatggtgcatccgaacgtgttgcgtaacgttggcatcgacccggaagtttactctggtttcggcttcgggatggggatggagcgtctgactatgttgcgttacggcgtcaccgacctgcgttcattcttcgaaaacgatctgcgtttcctcaaacagtttaaataaggaggacaatcatgaaaaagcctgaactcaccgcgacgtctgtcgagaagtttctgatcgaaaagttcgacagcgtctccgacctgatgcagctctcggagggcgaagaatctcgtgctttcagcttcgatgtaggagggcgtggatatgtcctgcgggtaaatagctgcgccgatggtttctacaaagatcgttatgtttatcggcactttgcatcggccgcgctcccgattccggaagtgcttgacattggggaattcagcgagagcctgacctattgcatctcccgccgtgcacagggtgtcacgttgcaagacctgcctgaaaccgaactgcccgctgttctgcagccggtcgcggaggccatggatgcgatcgctgcggccgatcttagccagacgagcgggttcggcccattcggaccgcaaggaatcggtcaatacactacatggcgtgatttcatatgcgcgattgctgatccccatgtgtatcactggcaaactgtgatggacgacaccgtcagtgcgtccgtcgcgcaggctctcgatgagctgatgctttgggccgaggactgccccgaagtccggcacctcgtgcacgcggatttcggctccaacaatgtcctgacggacaatggccgcataacagcggtcattgactggagcgaggcgatgttcggggattcccaatacgaggtcgccaacatcttcttctggaggccgtggttggcttgtatggagcagcagacgcgctacttcgagcggaggcatccggagcttgcaggatcgccgcggctccgggcgtatatgctccgcattggtcttgaccaactctatcagagcttggttgacggcaatttcgatgatgcagcttgggcgcagggtcgatgcgacgcaatcgtccgatccggagccgggactgtcgggcgtacacaaatcgcccgcagaagcgcggccgtctggaccgatggctgtgtagaagtacttgccgatagtggaaaccgacgccccagcactcgtccgagggcaaaggaataacctaggctcgagtaatggtttcttagacgtcttgacagctagctcagtcctaggtataatgctagcctgtcaccggatgtgctttccggtctgatgagtccgtgaggacgaaacagcctctacaaataattttgtttaatactagagaaagaggggaaatactagatggtgtcgaaaggtgaggagcttttcacgggggtggttccaatcttagtcgagcttgatggtgacgtgaatggccataagtttagcgtgcgcggcgagggtgagggcgatgcgacgaacggtaaacttactttaaagtttatttgtactacaggcaaattaccggtcccgtggccgaccctggtcactacgcttgggtatggggtagcatgttttgcccgttaccctgaccacatgaaacagcacgatttctttaaatctgccatgcccgaagggtatgttcaggagcgcactatcagttttaaagacgacggaacgtacaaaactcgtgctgaagtaaagttcgaaggtgatacccttgtgaaccgtatcgtccttaaaggcatcgacttcaaagaggacggtaacattttaggccacaaattagagtacaacttcaattcacataaggtttatatcacagcagataagcaaaaaaatggcatcaaggcaaattttaagacccgccacaacgtagaagatggtggagtccagttggcggaccactaccagcaaaatacaccgattggcgatggtccggttttgcttcccgacaatcactatcttagccaccagagtaaactgagtaaggacccaaatgaaaagcgcgaccacatggtattgaaagagcgcgttacagcagctggaattacacacgatatggacgaactttataagtaatagggataacagggtaatcgcaaaaaaccccgcttcggcggggttttttcgcgtttaaacgtgccagggcgtgcccttgggctccccgggcgcgttttttacgcgttctagagtccttactgcagtagttttgctgaaatactcgattcacaaaaatatcaacttatggttgttttgtgagatatcaatatatggttgttttgtggttaagttgctgattataaataattattaaatatcactttatggttgcatcaacaggtaccgagctctcatctgttacgctcggcgtgtagccggccagcctcgcagagcaggattcccgttgagcaccgccaggtgcgaataagggacagtgaagaaggaacacccgctcgcgggtgggcctacttcacctatcctgcccggctgatcgccgttggatacaccaaggaaagtctacacgaaccctttggcaaaatcctgtatatcgtgcgaaaaaggatggatataccgaaaaaatcgctataatgaccccgaagcagggttatgcagcggaaaagcgcttatcagcggtaccggtagctcggctgtgaatgaaatggacttaccaattaaagtaaaaggtgatgatttattcatcaaagtttttgtgccagtgtaaaccattttccaaactgtttaagagtgatttacaacgcgtagcatgtttactttgcgttttataaagctgtatttggtagctttatgccatctattgcttcaatactatgccaatatacacttcacttaccacgctgtaagttaataaaaccgagtttggttatgtcaacttatacttcaaacaaca

SEQ ID NO: 376 - DNA, 17617 bp, synthetic construct
  source 1..17617: mol_type = other DNA
gtaggggttactgaaaagtgagcgggaaagaagagtttcagaccatcaaggagcgggccaagcgcaagctggaacgcgacatgggtgcggacctgttggccgcgctcaacgacccgaaaaccgttgaagtcatgctcaacgcggacggcaaggtgtggcacgaacgccttggcgagccgatgcggtacatctgcgacatgcggcccagccagtcgcaggcgattatagaaacggtggccggattccacggcaaagaggtcacgcggcattcgcccatcctggaaggcgagttccccttggatggcagccgctttgccggccaattgccgccggtcgtggccgcgccaacctttgcgatccgcaagcgcgcggtcgccatcttcacgctggaacagtacgtcgaggcgggcatcatgacccgcgagcaatacgaggtcattaaaagcgccgtcgcggcgcatcgaaacatcctcgtcattggcggtactggctcgggcaagaccacgctcgtcaacgcgatcatcaatgaaatggtcgccttcaacccgtctgagcgcgtcgtcatcatcgaggacaccggcgaaatccagtgcgccgcagagaacgccgtccaataccacaccagcatcgacgtctcgatgacgctgctgctcaagacaacgctgcgtatgcgccccgaccgcatcctggtcggtgaggtacgtggccccgaagcccttgatctgttgatggcctggaacaccgggcatgaaggaggtgccgccaccctgcacgcaaacaaccccaaagcgggcctgagccggctcgccatgcttatcagcatgcacccggattcaccgaaacccattgagccgctgattggcgaggcggttcatgtggtcgtccatatcgccaggacccctagcggccgtcgagtgcaagaaattctcgaagttcttggttacgagaacggccagtacatcaccaaaaccctgtaaggagtatttccaatgacaacggctgttccgttccgtctgaccatgaatcgcggcattttgttctaccttgccgtgttcttcgttctcgctctcgcgttatccgcgcatccggcgatggcctcggaaggcaccggcggcagcttgccatatgagagctggctgacgaacctgcgcaactccgtaaccggcccggtggccttcgcgctgtccatcatcggcatcgtcgtcgccggcggcgtgctgatcttcggcggcgaactcaacgccttcttccgaaccctgatcttcctggttctggtgatggcgctgctggtcggcgcgcagaacgtgatgagcaccttcttcggtcgtggtgccgaaatcgcggccctcggcaacggggcgctgcaccaggtgcaagtcgcggcggcggatgccgtgcgtgcggtagcggctggacggctcgcctaatcatggctctgcgcacgatccccatccgtcgcgcaggcaaccgagaaaacctgttcatgggtggtgatcgtgaactggtgatgttctcgggcctgatggcgtttgcgctgattttcagcgcccaagagctgcgggccaccgtggtcggtctgatcctgtggttcggggcgctctatgcgttccgaatcatggcgaaggccgatccgaagatgcggttcgtgtacctgcgtcaccgccggtacaagccgtattacccggcccgctcgaccccgttccgcgagaacaccaatagccaagggaagcaataccgatgatccaagcaattgcgattgcaatcgcgggcctcggcgcgcttctgttgttcatcctctttgcccgcatccgcgcggtcgatgccgaactgaaactgaaaaagcatcgttccaaggacgccggcctggccgatctgctcaactacgccgctgtcgtcgatgacggcgtaatcgtgggcaagaacggcagctttatggctgcctggctgtacaagggcgatgacaacgcaagcagcaccgaccagcagcgcgaagtagtgtccgcccgcatcaaccaggccctcgcgggcctgggaagtgggtggatgatccatgtggacgccgtgcggcgtcctgctccgaactacgcggagcggggcctgtcggcgttccctgaccgtctgacggcagcgattgaagaagagcgccggcggcatttcgagagcctgggaacgatgtacgagggctatttcgtcctcaccttgacctggttcccgccgctgctcgcccagcgcaagttcgtcgagctgatgtttgacgacgacgcgaccgcaccggatcgcaaggcgcgcacgcggggcctcatcgaccaattcaagcgtgacgtgcgcagcatcgagtcgcgcctgtcgtcggccgtgtcgctcactcgcttgaaggggcacaagatcgtcaacgaggacggcacgaccgtcacgcatgacgacttcctgcgctggctgcaattctgcgtgacgggcctgcaccatccggtgcagctccccagcaacccgatgtacctggacgccctggtcggcggacaggaaatgtggggcggggtagtgcccaaggtcggccgcaagttcgtccaggtggtcgctctcgaaggcttccccttggagtcctatcccggcatcctgacggcgctcggcgagctgccctgcgagtatcggtggtcgagccggttcatcttcatggaccagcacgaagccgtgaagcacctcgacaagttccgcaagaagtggcggcagaagattcgcggcttcttcgaccaggtgttcaacacgaacaccggcccggtcgatcaggacgcgctttcgatggtggccgatgctgaggcggccattgccgaagtcaacagcggcatcgtggccgtgggctactacaccagcgtcgtcgtgctgatggatgaggaccgcacgcgcctggaagctgcggcccgcgatgttgaaaaggccgtcaaccggttgggctttgccgcgcgcatcgagtccatcaacaccctggacgccttccttggtagtttgccgggccacggcgtggaaaacgtccgccggccgctcatcaacacgatgaacctggccgacctgctgccgaccagcaccatctggaccggcaacgcgaacgcgccatgcccgatgtacccgccgctgtcgccggcgctcatgcactgcgtcacgcaaggatcaacgccgttccggctgaacctgcacgtgcgcgacctcggccacacctttatgttcgggccgaccggcgcaggtaaatcgacgcacctggcgatcctcgccgcgcagctccgtcgctatgccggcatgtcgatcttcgcctttgacaagggcatgtcgatgtacccgctggccgccggcatccgtgcggccacgaagggcaccagcggcctgcacttcaccgtggcggccgacgacgaacgcctggcgttctgcccgttgcagttcctgagcaccaagggcgaccgtgcttgggcgatggagtggatcgacaccatcctggcgttgaacggcgtcgaaacgaccccggcccagcgcaacgaaatcggcaacgcgatcatgagcatgcacgccagcggcgcgcgcacgctctccgagttcagcgtgacgattcaggatgaggcgatccgcgaggcgatccgccagtacaccgtcgatggcgcaatgggccatctgctcgacgccgaagaggacggcttggcgctgtccgactttacagtgttcgagatcgaagagctgatgaacctcggcgagaaattcgccctgcctgtgttgctctacctgttccgccgtatcgagcgcgccctgacgggccagccggccgtcatcatcctggacgaagcctggttgatgctcggccacccggcattccgcgcgaagatcagggaatggctcaaggtgctgcgtaaggccaactgccttgtgctgatggcaacgcagagcctgtccgacgccgccaacagcggcatcctggacgtgatcgtggaatcgaccgcgaccaagattttcctgccgaatatttacgccagggatgaggacacggcggccctgtaccgccgcatgggcctgaacgctcgccagatcgagattctggcccaggccgttcccaagcgtcagtactactacgtgtcggaaaacggccgccgtctctacgacctggcacttggcccgctcgcgctcgcgttcgtcggcgcatccgacaaggaatccgtcgccatcatcaagaacctggaagccaagttcggcgaccagtgggtggatgaatggctgcgtggccggggcctcgcccttgatgaatacctggaggcagcatgagttttgcagacacgatcaagggcttgatcttcaagaagaagcccgcaacggccgcagcagcggcgacgccggccgcgaccggcccgcaaaccgacaacccgtacctgacggcgcggcgcacctggaacgaccacgttggttccgttgtgtcgcaaaagcagacctggcaggttgtcggcatcctttcgctgatgatcgtcctcgcggcggtcggcggcatcatccacatcggcagccagtcgaagttcgtgccctatgtctacgaggtagacaagctcgggcagacggccgccgtggggccgatgaccagggcgtcgaaagccgatccgcgtgtcattcacgcctcggtggctgagttcgtcggcgatgctcgcctggtgacgccggacgtagctttgcagcgcaaggccgtctaccgcctctatgccaagctcgggccgaatgacccggccaccgccaagatgaacgaatggctcaacggcaccgccgacgccagcccgttcgctcgcgcggccgtcgaaacggtcagcaccgaaatcacttccgtaatcccgcagacgcccgacacctggcaggtcgattgggtcgagacgacgcgcgacaggcaaggcgtggtgaaaggccagcccgtgcgcatgcgggccttggtgacggtctacgtcgtcgagccgacggcggacaccaaggaagaacaactgcgaaacaacccggccgggatctacgtccgggacttctcctggtcgagacttctgtgaggcactgaattatgaaaaaggaactgtttgctttggtcctggccgcgtccgttagcgtgcctgcatttgccgccgatcccggcgcggacctgactgacctctatttttccggcaagaacccggagctgaccgcgcaagagcgggcggccatcgccatcgccaagaagtgggaggcgggtaccgccggcatgcggccggtggccggccccggtggttcggtgcgcttcctgttcggcgcgcagcagccgagcatcgtatgcgccgtgctgcaagtgtgcgacgtggccctgcaacccggcgagcaagtcaactcgatcaacctgggcgacaccgcccgttggacggtcgagccggccattaccggcagcggcgcgaacgaaacccagcacctcatcatcaagccgatggatgtgggcctggaaaccagcctggtcgtgaccacggaccgccgcagctaccacatgcgcctgcgctcgcatcgcacgcagtacatgccgcaggtgtcgttcacctacccggaagatgcccttgcgaagtgggacgccatcaagaaccgcgaacagcgggatcgcgtcgagaaaaccattccgcagaccggcgagtacctgggcaacctgagcttcaactactccgtcagcgggtccacgtcgtggaagccggtgcgcgtctacaacgacggcaagaaaaccatcatccagatgccgcactcgatggaacagaccgaagcgccgacgctcctggtcgttcgcagggagggcggcctgttctccgacgatgaaacggtgatggtcaactaccgggtccagggcgaccgctacatcgtcgatacgattttcgacaaggccatcctcatcgcgggcgtgggcagcagccaggaccgcgtgaccatttcaagggggaactaaaccatgcgtaagattctgaccgtcatcgcactcgcggccacgttggccggctgcgcgacctccaagtacggcagcttcgtccaggacgcgccggccgcctacaaccagaccattgcgaccgacgcggtgaagcagctcgtcaagctctacccgccggcgcaaaccaagctggaattgcagcaggctacgcccgatccgttcggcattgccctggtcactgaccttcgcgcccagggctatgctgtcatggagtacaagcccgacggcaacgcggccgcagctccggctgctgcgtcctcggccgctgcgaagccggcaacgccgcaagcccagggcggctatccgctgcgctacgtgctggaccaattcagcgacagcaacctgtatcgcctgaccgtcatggtcggctctcaatcgctcacgcgcgcctacctcgcccaaaacaacacgatggtcccggccggcgcatgggttcggaaggagtaagccaatgagcgaagatcaaatggcaccggacgcatcgccagatgcggtcaagccgaaaagcggggttcgccgcgtcaacaacatgccgatgtacctcatcggcggtgtgctcggcatcttcctgctggtgatggccctggttgctgcggatcgcgctgcgcagcagaaccagccgggagctgcgaaggctgagaaggccggcagcaccagcatgtttgccgacgaaattgccggcaaacagcaggacggcatcatcaaggccaagccgctggagattccgccggaacaaaccgcccagcaaccgacgacggagctgacgccagccccggcgcagggaacgactatcacggtcgcacggcccgagaacctggaccagcccccgacgccgccgcagggtgcgcgcaacgaggacctggaccgcatccgcatggcgaagttgcagatgctggaagaggcgatcaaggccaagacgacggtgcgcatcgacgcgccgcgcagccagggcagcgccggcggcggtgctccgcagggccgcgaggaaacccttgcgcgcatccaggagctgcgtcggcaggctgagaacgcccgcgccaccgatccgaccgccgcctatcaggccgcgcttgcgcaggctcgcacgatgggcggcgcggcagggggtggcggtatgggcggctcgggtgcgccgaccctcgtgcagacctcgaaccgcagtggtggcggcgctggctatgggtcgttcgacaaccgcagcgagggcgaccgttggcggctcgactcccagccggaagcacctgcaacgccctatgtgctgcgcgctggcttcgtcgttccggctacgcttatctcgggcatcaactccgatctgccaggccaaatcatggcccaggtatcgcagtcggtgtacgacacggcgaccggcaagcacatgctcatcccccaaggctcgcgcctggtgggcagctactcgaacgatgtggcctacgggcagaagcgcgttctggtggcatggcagcgcatcatcttccccgacggcaaggcaatggacattggggccatgccgggcggcgatagcgctgggtatgcaggcttcaacgacaaggtcaacaaccactacttccgcaccttcgcatcggcattcctcatgtcgggcgtcgttgcgggcatcagcttgagtcaggaccgtggcaacagcaacagcggttacggacgacaagacgcgggttccgcgatgagtgaagcgttgggtcaacagctcggccaagtaacggcgcagatgatcgccaaaaacttgaatatcgcgccgacgctggaaatccgtccgggctatcgcttcaacgtcattgtcacgaaagacatgacgttttctaagccctaccaggcgtttgactattaactccaaggagtaacttatgaagaagctcgctaagaatgttttagccgctaaagtagctctggtgctggccctctcggtcggcaccttggcggtcacgcctgcgcaagcgggcattccggtcatcgacggcaccaacctgtcacaaaccactgtcaccgcgattcagcaggttgcgcaggtccagaagcaaatcgaggaataccggacgcagttgcagcagtacgaaaacatgctgcaaaacacggtggccccggccgcctacgtgtgggaccaggcgcagtccaccatcaacggcctgatgagcgccgttgataccctgaactactacaagaaccaggcgggcagcatcgacgcttacctgggcaagttcaaggacgtgtcctactacaaggggtcgccgtgcttctccctgtcgggctgctcggaaagcgagcgcaaggcgatggaagagaaccgccgcctggcgtccgaatcgcagaaaaaggccaacgatgcgctgttccgtggcctcgatcagcagcagagcaacctcaagtccgacgccgccacgctggagcaattgaagggcaaggcgacgacggcgcagggccagttggaagccctcggctacgccaaccagttcgccagccagcaggccaaccagctcatgcaaatccgtggccttctgcttgcgcagcagaacgccatcgccacgcagatgcaggcccagcaggaccggcaggcccagcaggacgctgcgggcgcgaagctgcgcgagggttcgtaccgcgcaagcccgtctaagacctggtgaggggaggcgcgatgaagaaatccaacttcatcgcagttgccgcgctggccgccgtcatggcggccagcctggcaggctgcgacaacaagcccgacaccgacaagctgacctgcgccgatctgccgaaggtcacggatgccgctcaacgcgcggagctgttgaagaagtgcccgcgcggagaaccgggaggcttcaagcccagcgaaaagaaagagtggtgatgacgtatgaaaatccagactagagctgccgcgctcgcggtcctgatgctggccttgatgccggtagcggcatacgcccaaatcgacaattcgggcatcctcgacaacgtattgcagcgctaccagaacgccgcgagcggctgggccactgtcgtccagaacgccgcaacctggctgttctggaccttgaccgtgattagcatggtctggaccttcggcatgatggcactgcgcaaggccgacattggcgagttcttcgccgagttcgtgcggttcaccatcttcaccggcttcttctggtggctgctgaccaacggcccgaatttcgcgtcgtccatctatgcgtccctgcggcagattgcaggccaggcaacggggttggggcaggggctttcgccgtccggcatcgtcgatgttggcttcgagattttcttcaaggtgatggacgaaacctcgtactggtcgccggtcgatagcttcgtcggtgcctcgttggcggccgccatcctctgcatcctggccctggtcggcgtgaatatgcttctgctcctggcgtccggatggattcttgcctacggcggtgtgttcttcctgggcttcggcggctcgcgctggacctcggacatggcgatcaactactacaagaccgtcctcggggtcgccgcgcagctcttcgcaatggtgctgctcgtaggcatcggcaagaccttcctcgatgactactacagccgcatgagcgaaggcatcaacttcaaggaacttggagtgatgctgatcgtcggcctgatcctgctcgttctggtcaacaaggtgccgcagctcatcgccggcatcatcaccggcgcgagcgtcggcggtgctggtatcggccagttcggcgctggcacgctcgtcggtgcggccgcgacggccggcgcggcaatcgcaactggcggcgcatctatcgcggccggcgctgcggcggcggccggtggcgcgcaggccatcatggcggccgcgtcgaaggccagcgataacgtctctgccggcactgacattctgtcgagcatgatgggcggcggcggtggcggcggcggtggtagcgccggcaccagcggcggcgacggcggcggctcgggtggcggcggtggctcgggcggcggtgaaaccccgatggcctcggccgccggcgacaacagcagcggcgcacgcggcggcagttcgggcggcggctcgggtggtggccgttcgtctggcggtatcggtgccacggcggccaagggcggccggatcgcggccgataccgtcgccaacctggcgaaaggtgccggctcgattgccaaggccaaggccggcgaaatgcgcgcatcggcccaggaacgcatcggcgataccgtaggcggcaagatcgcgcaggcaattcgcggcgcgggtgcggcggcgcagaccgctgcaaccgtcgccgatagcaacagccaggcgcaggaacaacctgcaccggcacccgcaccgtcgttcgacgacaacagcctttccgcaagcaacaacagggaagcggccgccgacgcggattccgaagtggcgagcttcgtcaacaagcccgcccaatcctgaaacgactcttaggagctacgtaaggctgttttggcggatgagggcgcagtcagagcttgggcctgtcaaacaagcccagctaacgcaaaaacaagcccggcaacgccgggctttttcatctgcgcctctgcgattcataacgaggcccacaccaccagggcggccgcgaacaacaccatgccgccggcgatcatgttcatcatcgccacgcgccgcgcgtccgcgaccttggccgcgagctggcggccaaggccgtcgtcgatttccctgcggatcgcttcggccgcctgcgcggcgctgtccttcattaccttcgccattgcgtccttgctggccgccagggccgcgttcagcatccgctccgctttggccttggcgtcctcgccccaacgatgggcgatcccttccagctcttccttgaacgcggcaaggatttcctcttgcttggccgcactgtcggccatgagccgggcgttgatggtatgcaggatcagcaccgggtcgtcgcggccgacggcgatgccgtgcttggccgcaatctcccggatcagctcttcaatctggtcgctcatagcacggccgccgcgtcgagctgttcaaacaggccgcgccgcacgatcttgaggcgttgccgcgtcatgatcgtgagcgattcatcggccagcgcctggtcgaacgtcagccgctcttgcagcatgtcgctgaaatcgcggccgtaggtttcttccttgagggccggaatctggatgatggacgacacgcgggccttgttggccgtgtacgccttcatctgctcaaagctcttgccctcatgctcgataggcccccaatacgggttcagccagaccacgaaaagcgcttcggccgggaactggctggcgagctgggcgaagccgctcaccgtgtccaggagagcctggccgccggtgacgacggtatggatgaccagctcatgccccatttcttgcagcagagccggcacctggttgctgatgaggtaatgcgacagaggcacgaacgagctggcaccgttgtcgatcaccacgtcatccttggtcggcgcaatcagctcgaccagggtgtcgaagttgcgcgagttaatttcgtcgccggccatgatgttcagccggcggacgttcagggccttgtagccctcgaacgtcgcgttcaccgggtcggtgtcgatgcacaagggtgtctgccccttgtccatcttgtactgcgcaatgatcgcggcgatggccgacttgccgaccccgcccttgccctgcaaaaccatgtgaattttcgccattacagtagatcctttttgtccggtgttgggttgaaggtgaagccggtcggggccgcagcgggggccggcttttcagccttgcccccctgcttcggccgccgtggctccggcgtcttgggtgccggcgcgggttccgcagccttggcctgcggtgcgggcacatcggcgggcttggccttgatgtgccgcctggcgtgcgagcggaacgtctcgtaggagaacttgaccttccccgtttcccgcatgtgctcccaaatggtgacgagcgcatagccggacgctaacgccgcctcgacatccgccctcaccgccaggaacgcaaccgcagcctcatcacgccggcgcttcttggccgcgcgggattcaacccactcggccagctcgtcggtgtagctctttggcatcgtctctcgcctgtcccctcagttcagtaatttcctgcatttgcctgtttccagtcggtagatattccacaaaacagcagggaagcagcgcttttccgctgcataaccctgcttcggggtcattatagcgattttttcggtatatccatcctttttcgcacgatatacaggattttgcttaatttgaaaattggaatatccatcacataacgacatgtcgcagcaatttaatccatatttatgctgtttccgacctgacacctgcgtgagttgttcacgtattttttcacggtgtatccaacggcgtcagtaggcccacccgcgagcgggtgttccttcttcactgtcccttattcgcacctggcggtgctcaacgggaatcctgctctgcgaggctggccggctaccgccggcgtaacagatgagggcaagcggatggctgatgaaaccaagccaaccaggaagggcagcccacctatcaaggtgtactgccttccagacgaacgaagagcgattgaggaaaaggcggcggcggccggcatgagcctgtcggcctacctgctggccgtcggccagggctacaaaatcacgggcgtcgtggactatgagcacgtccgcgagctggcccgcatcaatggcgacctgggccgcctgggcggcctgctgaaactctggctcaccgacgacccgcgcacggcgcggttcggtgatgccacgatcctcgccctgctggcgaagatcgaagagaagcaggacgagcttggcaaggtcatgatgggcgtggtccgcccgagggcagagccatgacttttttagccgctaaaacggccggggggtgcgcgtgattgccaagcacgtccccatgcgctccatcaagaagagcgacttcgcggagctggtgaagtacatcaccgacgagcaaggcaagaccgagcgcctgggtcacgtgcgcgtcacgaactgcgaggcaaacaccctgcccgctgtcatggccgaggtgatggcgacccagcacggcaacacccgttccgaggccgacaagacctatcacctgctggttagcttccgcgcgggagagaagcccgacgcggagacgttgcgcgcgattgaggaccgcatctgcgctgggcttggcttcgccgagcatcagcgcgtcagtgccgtgcatcacgacaccgacaacctgcacatccatatcgccatcaacaagattcacccgacccgaaacaccatccatgagccgtatcgggcctaccgcgccctcgctgacctctgcgcgacgctcgaacgggactacgggcttgagcgtgacaatcacgaaacgcggcagcgcgtttccgagaaccgcgcgaacgacatggagcggcacgcgggcgtggaaagcctggtcggctggatcaagcgcgaatgcctgccggagctgcaagcggcgcaatcctgggaggacctgcaccgcgtcctgcgggaaaacgggcttaagctgcgcgagcgcggaaacggcttcatcttcgaggccggcgacggcacgacggtcaaggccagcaccgtttcgcgcgacctgtccaagccgaagctcgaagcccgattcggggcattcacgccagccgagggcggcgaagccccccggcggcgggagtatcgagcgaagccgctcaagacccgcatcgacaccaccgagctatacgcccggtatcagtctgaacgccaggaaatgggggccgtgcgcaagggcgagctggacacgctgcgccggcgtcgtgaccgcctgattgaagccgcgatgcgcagcaaccggctgcgccgcgccgctatcaagctgctgggcgaggggcgcattgcaaagcgactgatgtacgcgcaggcgcacaaggctctgcgcgccgacctggacaagatcaaccgcgagtaccggcagggccgtcaggcggtccaggagcgcacgcagcgccgcgcgtgggccgactggctcaaggccgaggcgatgaagggcgacgacaaggccctggccgcgctgcgcgcacgcgagggccgcagcgacctcaagggcaacaccatccagggcagcggcgaggccaagccgggccatgcggccgtgacggacaacatcacgaagaagggaaccatcatctatcgcgtcggcagcagcgccgtccgcgacgacggcgaccgcctgcaagtctcgcgcgaggccaccacggacggcctggacgccgccctgcgcctggcaatggagcgcttcggcgaccggatcaccgtcaacggcacagcagagttcaaggagcggatcgcgcaggcggccgccgctggccgtctggcaatcacctttgacgacgccgcccttgagcgccgccgtcaagaactactgacgaaggagcaagcacatgagcaacccgaacgaaatgacggacgaagagatcgcggcggcgatggaggcattcgacctgccgcagccagaaccaccctcaacgccacaggcggcgacggcgaccgacgggacgctcgcgccgtcagcgccggcggaaccgtcgcactccgcaagcccaacgttggacgcattggacgaaagccgccgccccaaagccaaaaccgtttgcgagcgctgtcccaactcggtgtggttcgcatcgccggcggagctgaaatgctattgccgcgtgatgttcctggtcacgtggagcagcaaggagccgaaccagctcacgcactgcgacggggagtttctgggccaggaagagggctaaagcccgaacagatcgcggcggccgagaaatatgttgccgagcgcgagcaaaagcggctaaacggcttcgatataccgaagcatgcacgatatactgattatgttggtgcgctgtcctatgcaggcacccggaacgtcgaggaccaggcgctggccctgttgaggaaagaaaacgacgagattctggtgctgcccgtcgataaggccacggtgcaacgcatgaagcgcctcgccatcggtgatcccgtcaccgtgaccccgcgaggctcccttaaaactacccgaggtaggagtagatgaagaaccgaaacaacgccgtggggccacagatacgggcgaaaaaaccgaaggccagcaagaccgttcccatcctcgccggcctgtcccttggggcaggcttgcagaccgcgacgcaatatttcgcccattccttccagtatcaggccggacttggctggaatatcaaccacgtctacacgccctggtcgatccttcaatgggccggcaagtggtacggccaatatcccgacgatttcatgcgcgcggccagcatgggtatggtcgtttcgaccgtgggcctgctgggcacggccgtcacgcagatggtcaaggcgaacaccggcaaggcgaacgactatctgcacggttcggcccgctgggccgacaagaaggacatacaggccgccggcctgctgccccggccgcgcaccgtcgtcgagctggtgtcaggcaaacacccgcccacttccagcggcgtctatgtgggcggctggcaggacaaggacggcaagttccactacctgcggcacaacggccccgagcacgtcttgacctacgcgccgacgcgctccggcaagggcgtcggcctggtcgttccgacgctgctttcctgggcgcacagcgccgtcatcaccgacctgaaaggcgagttgtgggcgctgaccgccggctggcggaagaagcatgcccgcaacaaggtcgtgcgctttgagccggcatccgcgcagggtagcgcgtgctggaacccgctcgatgaaatccgcttggggaccgagtacgaggttggcgacgtgcagaaccttgccaccctgatcgtcgatccggacggcaagggcctggaatcgcactggcagaaaaccagccaggcgctgcttgtcggcgtcatcctgcacgcgctctacaaggctaagaacgagggtacgccggccaccctgccgtcggtggacggcatgcttgccgacccgaaccgcgacgtgggcgagctttggatggaaatgaccacctacggccacgttgacgggcagaaccaccctgcggtcggctctgcggcccgcgacatgatggaccgcccggaggaagaatccggttccgtgctgtccaccgccaagtcctacctggccctgtaccgcgacccggttgtggcccgcaacgtcagcaagtccgacttccgcatcaagcaactgatgcaccacgacgacccggtaagcctgttcatcgtgacgcagcccaacgacaaggcccgtctgcggcctctggtgcgcgtcatggtcaacatgatcgtccggctgctggccgacaagatggacttcgagaacggccgtcctgtcgcgcactacaagcatcgtctgctgatgatgctcgacgagttccccagcctgggcaagctcgaaatcctgcaagagtcccttgccttcgtcgccggctacggcatcaagtgctacctcatctgccaggacattaaccagctcaagagccgcgaaaccggctacggccacgacgaaagcatcacgtcgaactgccacgtgcagaacgcctacccgccgaaccgcgtggagacggccgagcacctgtcaaaactgacaggcaccacgaccatcgtgaaggagcagatcacgacgagcggccgccgcacgtcggcgctgttgggcaacgtctcgcggaccttccaggaagtgcagcggccattgctgacccccgatgaatgcctgcgcatgccggggccgaagaagagcgccgacggcagcattgaagaggcgggcgacatggttgtgtacgtcgccggctatcccgcgatctacggcaagcagccgctctacttcaaagacccgatattccaggcccgcgcggccgtaccggctccgaaggtcagcgacaagctgatccagacggccaccgtcgaggaaggggaggggatcacgatatgagccgcttccagcgcctcaccaagtacgtcgccatcggaggcggcgcggccttgttgctcgccggcgcggcctatctcgccggcgcgaaggtcaacaccaccaaaagcattccggtcggcctgtactggaaatcgaatgcgccggtggagaagggggcttacgtcatgttctgcccgccgcaagtcggcgtgttttcggacgccaaggagcggggctacatcgccggcggtttctgccccggcgactacggctacatgatgaagcgagttttagccgctaaaggcgacgaggttgccatcaccgacgccggcgtgcgcgtgaatggcgggctgctgcctcacagcgcgctcatcaaggccgatccatcaggacggccgctgcctcgttatcagtccgacagctacaccctggggaccgccgaggttctgcttatgtccgacgtaagcgacacgtctttcgacggccgctacttcgggcctgtcaatcgttcgcaaatcatcaccgtcatcaggccggttctgacctggtga

SEQ ID NO: 377 - DNA, 8262 bp, synthetic construct
  source 1..8262: mol_type = other DNA
atgtttttgcaaagacctaaaccttacagcgatgaaagtttagaaagtttctttatccgagtggctaacaaaaatggctacggtgatgtccatcgcttcctagaagccactaaacgattccttcaagacattgaccataatggctatcaaacctttccgactgatataactcggataaacccatactcagctaaaaacagttccagcgcacgaactgcgtcattcctgaaacttgcacaattgacatttaatgaaccgccagagctacttgggttggcaattaacagaacaaacatgaaatactcgccgtcaactagcgcggttgttagaggtgcagaagtctttcctcgcagtttactacggacgcactccatcccctgctgtcctttgtgtctgcgagaaaatggctacgcctcctacctttggcactttcaggggtacgaatactgccacagccataacgtacctttaattaccacttgtagctgtggtaaggagtttgactaccgagtatctgggttaaagggcatttgctgcaaatgcaaggagcctatcaccttaaccagcagggagaacggtcatgaggcagcgtgtactgtttcaaactggcttgctggccatgaatctaaacctctgccaaatcttcctaaaagctaccgatggggtttagttcattggtggatgggtattaaagatagcgagttcgatcacttttcgttcgttcaatttttctcaaactggccaaggtcattccactcgataatcgaagatgaagtagagttcaaccttgagcatgctgttgtcagcacgtctgaattacgactaaaagatcttcttggtcgattgtttttcggttcaattcggttacctgagcggaatcttcaacacaatatcatccttggtgagcttctctgctatttagaaaatcgtttatggcaagacaagggattaatcgccaacctcaaaatgaacgcgttagaggcgactgtaatgttaaattgtagcctcgatcagattgcatcaatggttgaacaacgcatcttgaagccaaatcgaaaaagcaagcccaacagccctcttgatgttaccgattatctatttcatttcggcgatattttctgtctttggttagctgagttccaaagcgatgagtttaaccgttcgttttatgtgtcgaggtggtaaatgcaaactctgaaagaactaatcgcatccaatcctgacgacttaacaactgaacttaagagagcatttcgtccactcacaccgcatattgcaattgatggtaatgaacttgacgcactgacgatattagtcaatttaaccgataagactgatgatcagaaagacctgctcgatcgagccaaatgcaagcaaaaacttcgagatgaaaaatggtgggctagctgcataaattgcgttaattacagacaaagccataacccaaaattcccggatatacgttctgaaggcgtgattcgaacccaagccctgggtgaattaccgagtttcctactctcgtcctcaaaaatcccaccataccattggtcatatagccatgattcaaaatacgtcaacaaaagcgcattcctcaccaatgagttttgttgggatggtgagatctcatgtttgggtgagcttcttaaagatgcagatcacccactttggaatactttgaaaaagttaggttgttctcaaaaaacttgcaaagcaatggcaaaacaactagctgatattactctcacgactatcaatgtcacactcgcaccaaattacctgactcaaatatctctccccgatagtgatacatcctacatttcactctctcctgttgcatcgctatcgatgcaaagccactttcatcagaggctccaagatgaaaatcggcatagcgcgataacgcggtttagccgaactaccaacatgggggtcactgcgatgacatgtggcggcgcatttagaatgttaaagtctggcgctaagttttccagcccccctcatcaccgattaaacagtaaacgaagttggttgacgtcagagcatgttcagtcattaaaacagtaccagcgcctcaacaaaagcctcatacctgaaaactctcggattgcactccgtagaaaatacaaaatcgagcttcaaaatatggtcagatcttggtttgcaatgcaagaccatacccttgattcgaacatacttatccaacatttgaatcatgacctatcttacttaggagccacaaaacgttttgcatacgatccagcgatgaccaagctctttactgagcttttgaaacgagagttatcaaattcaatcaataatggtgagcaacacactaatggatcgtttttagtcctaccgaatatcagggtttgtggcgcaacagctttaagctccccggtaacggtggggattccatcacttacagctttctttggcttcgttcacgcatttgaacggaatataaatcgcaccacctcatcgtttcgtgttgaatcctttgcgatatgcgtccatcaactacatgtcgagaagcgaggtttgacagcagagtttgtggaaaaaggcgacgggactatatccgctcccgcgacccgggatgactggcagtgtgatgtcgtatttagccttattttgaacaccaactttgctcaacatattgaccaagatacgttagttacatcactaccaaagcgattggctcggggttcagcaaaaattgcgattgatgactttaaacatatcaactcattctcgacattagaaacagcgatcgaatctctgccaatagaagctggtaggtggttatcactttacgcacagtcaaacaataatctaagtgatctattagcagccatgacagaggaccatcagctcatggcaagctgcgtcggttaccacttgttagaagagcccaaagataaaccaaactccctcagaggttacaaacacgctatcgccgagtgcatcattggactcattaactcaatcacctttagctcagagactgatcccaacacaatcttttggtcgctaaagaactatcaaaactacctagtggtacagccaaggagtatcaacgatgaaactaccgacaaatctagcctatgagcgctctatcgacccatcagatgtctgtttttttgtcgtctggcccgatgatagaaaaacacctttaacctacaattctcgtactctgctcgggcaaatggaagcggcatcattagcctatgatgtctcaggtcaaccaataaaaagtgccaccgctgaggcgttagctcaagggaaccctcatcaagttgatttctgccacgttccatacggtgcgagtcatattgaatgcagtttctccgtctcgttttcttctgaactacgtcaaccatataagtgtaactcaagcaaagttaaacaaacgctagtgcaattagtcgagctctacgaaacgaaaatcggctggactgagctagcaacccgatatttgatgaacatttgcaacggtaaatggctgtggaaaaatacccgtaaagcctattgctggaacattgtacttacaccttggccttggaacggggaaaaggttggatttgaagatattcgtactaactacacctcacggcaagactttaaaaataataaaaattggtctgctatagttgaaatgatcaaaaccgcattttctagtactgatgggctggcgatatttgaagtcagggccaccttgcacttgccaacgaatgctatggtgcggccaagccaagttttcacagaaaaagaaagtggcagtaaaagtaaatctaaaactcaaaacagtcgagtttttcagagtacaactattgatggtgaacgatcgccaatactaggggcctttaaaacgggagcagctattgcaaccattgacgactggtatcctgaagccactgagccactaagggtcggacggtttggggttcatcgcgaagatgtcacttgctaccgtcatccgtctaccggaaaagattttttctcgatattacaacaagcagagcactatattgaagtgttgagcgccaacaaaactcccgctcaagaaactatcaacgacatgcactttttaatggctaacctgattaagggtgggatgttccagcataaaggagactgactgtgaaatggtattataagacaatcacctttctgccagagttgtgcaacaacgagtcactggctgcaaagtgtctccgcgttctgcatggatttaactatcagtatgagacacgaaatatcggcgtttcatttccgctttggtgtgatgcaacggttggaaaaaagatttcatttgtcagcaagaacaagatagaactcgacttactacttaaacaacactatttcgtccaaatggaacaacttcaatactttcatatatccaacactgttctcgtcccagaagattgtacatacgtttcctttagacgctgtcaatctatagataagctcacagcagcagggctggcaaggaaaatcagacgcctggagaaacgtgctctatctagaggcgagcaatttgacccatcatcttttgctcaaaaagagcatactgcaatagcgcactaccactcacttggggagtccagcaaacagacgaaccgcaactttcgactcaatatcaggatgctctcggagcaaccccgtgaggggaactcgatttttagtagctatggcttatcaaattcagaaaactcgtttcagcctgtacccttaatctgacctttaataaggagatataccatggcgacaagtttacctacgccctcagcaattacgacttcggcgttagagtatgcattccatactcccgctcgcaatctaacgaaatctcgcggaaaaaacattcatcgttatgtcagtgtaaagatgagtaagaggattacggtagaatctactctagagtgtgatgcctgctatcactttgattttgagccaagtattgttcgcttttgcgctcaaccgattcgatttttatattatctcaatggtcagtctcactcctatgttcctgactttctagttcaatttgataccaacgagtttgttctatatgaagtaaagtcagcttatgctaagaacaaacctgattttgatgttgaatgggaggcgaaagtaaaagcagcaactgaactagggctagaattggagcttgttgaagagagtgatattagggatacggttgtattaaataatcttaagcgcatgcatcgttatgcttcgaaagatgagctgaataacgtacataactctctcttaaaaataataaagtacaatggcgcccaatctgcaagatgcttgggagaacagttgggtttaaaaggccgaactgttttaccaattttgtgcgatttgctgtcaaggtgtttactcgatacacgtttggataagcctctatctcttgaatctcgatttgagttggccagttatggctaagaaagggttctcaagtttccatagaaaagcagtctcttcccaagatacgcttgaatcgatagagcttgtctctagcgctaattgtctagaaagtgttacgtatcaagatatatcagcatttcccgaaacaattgcggtagagattaatttccgattaagcattcttcgctttttagcgcgaaagtgcgaaaccattgtggccaaatcaattgaaccacatcgtgtagagctacagcaaaactatagtagaaaaatacccagtgcaataacgatatatcgatggtggcttgcttttcgaaaatcagactacaaccccattagcttagcacctaatatcaaggatagaggtaatagagagacaaaagtgtcaacagttgttgattctattatggaacaggcagttgaaagagttatatctggacgaaaagtcaatgttagctctgcatataaacgtgttcgacgaaaagttcgtcaatacaatctaactcatggaacgaaatacacgtatcctaagtacgaatctgtaagaaagcgagtaaaaaagaaaaccccatttgagttattagccgcagggaaaggggagagagtagctaagagagagtttcgccgaatgggaaaaaagatcctcacgtctagcgtgctagagagggttgaaatagatcacactgtcgttgacctttttgcagtacacgaagagtatcgaatcccattgggccgaccttggcttactcaattggttgattgttacagtaaagctgtaatcggtttttatttaggtttcgagcctcctagctatgtgtcggtttcccttgcacttaagaatgcaatacaacgcaaagatgacttaatctcctcgtatgaatcgatcgagaatgaatggctatgttatggcatcccagacctactcgtaactgataatggtaaagagtttttgtcgaaagcatttgatcaagcatgtgaatcactattgatcaatgtgcatcaaaataaagttgagacgcccgacaacaaacctcatgttgaacgtaactacgggactattaatacttctctgttagacgatttacctgggaaatccttcagccagtaccttcaaagagaagggtacgactctgtgggagaagctacccttacactcaatgagattagagaaatttacttaatttggttggtggatatttatcataaaaaacccaatcagagaggcactaattgtcctaatgttgcgtggaaaaagggttgtcaagaatgggaaccagaggagttctctggttctaaagacgaattagactttaaatttgctattgttgattacaaacaacttactaaagtagggataactgtctacaaagaactgagttatagcaatgaccgtttagctgaatatagagggaagaaaggaaaccataaagttcagttcaagtataaccctgagtgtatggcagttatttgggtgttggatgaggatatgaatgagtactttacagttaatgcgattgactacgaatatgcaagtagagtatcactttggcaacataaatataacatgaaatatcaagcagaactaaattcagcagaatatgatgaggacaaggaaattgatgcagaaataaaaattgaagaaatcgcagatcgttcaattgttaagactaacaaaatcagagctcggaggcgtggcgctaggcatcaagagaatagcgcaagggctaagtcaatcagtaatgcgaacccggcctcgatacaaaaacatgaagatgaaatcgttagtgcagataatgacgattgggatattgattatgtctgagaaatcgtcaaatgagtgaaacgcgtgaggctcgtatatcaagagctaaaagggcatttgtatccacaccgagcgttaggaaaatcttgagttacatggatagatgtagagatctatcagacctagagtctgagcctacatgcatgatggtctatggtgcttcgggtgtaggtaaaacgaccgtcatcaagaaatacttaaatcaaaacagaagagagtccgaagccgggggcgatataataccggttttgcatattgagttgccagacaatgcgaagccagtagatgcagcaagggaattgctggttgaaatgggtgacccgctagcactttatgaaactgacttagctagattgacgaaaagactgactgaattaatccctgcggtcggcgtgaagctgattattatcgatgagttccaacatttggtggaagaaaggtcaaatcgggttcttacccaagtaggtaattggctaaaaatgatacttaacaaaacgaaatgtccaattgttatatttggtatgccatactcaaaagttgtactgcaagcaaactcgcaacttcacgggcgattttccattcaggttgaactgcgcccctttagctaccagggaggtagaggtgtatttaaaacttttttggaataccttgataaagccctaccttttgaaaaacaggctggcttagccaacgaaagtttgcagaaaaaattgtatgcattctctcagggaaacatgcgttcgttgagaaaccttatttatcaagcatctatcgaagcaattgataatcagcatgagacgataaccgaagaagatttcgtttttgcatcgaagttgacatcgggcgataaacccaactcatggaaaaatccttttgaggagggtgttgaggtaacagaagatatgttacgaccgccaccaaaagatattggttgggaggactatttgagacattcaaccccgagagtgagtaaaccaggtagaaataaaaactttttcgaataa

SEQ ID NO: 378 - DNA, 8490 bp, synthetic construct
  source 1..8490: mol_type = other DNA
atggcttttctattttctcccaaggctcgggcattttctgacgaatcgctggaaagttacttgttacgggtcgtttcagagaatttttttgactcgtatgaagggctcagcttagctattcgcgaagagctgcatgagcttgattttgaggcgcatggtgcattcccagtagatttaaagaggctcaatgtttaccacgccaaacataatagccattttaggatgcgggctttaggactactcgaaacactactagatttacctcgatacgagctacaaaagttggctttgctaaagtcagatattaaatttaactcctccgtcgctttatataacaatggcgtagacattcccctgaggtttattcgtcaccacgccgaggaagctgttgattcgattccggtatgctcacaatgtcttgcagaagaagcctatataaaacaaagttggcatataaagtgggtaaatgcatgcactaaacatcagtgtgctttgctacataactgcccagaatgctacgctccaattaactatatcgagaatgagtcaattactcattgttcatgcggttttgagctgtcttgcgctagtacctcgcctgtaaatacgttaagtattgaacatttaaataaattactggataaaggtgagcgcaacgatagtaacccgctatttaacaatatgactcttacagaacgttttgctgcgcttctttggtatcaggagcggtattctcaaacagataacttttgtttaaatgatgctgtgaactattttagtaaatggccagcagtttttaatacagagcttgatgaactaagtaaaaatgcagaaatgaagttaatagatctgtttaataaaactgagtttaagtttatttttggggatgctattttagcttgccccagtactcaaaagcagagtgaatctcactttatttatagggctctattagattatttagttactttagttgagagtaaccctaaaactaaaaagcccaacgcagccgacttattagtaagtgtattggaggctgcaactttattaggtacttcagtagagcaggtttataggttgtaccaaaatggtattttgcaaacggcatttcgtcataaaatgaaccagcggatcaacccttataagggcgcgttttttttaagacatgttatagagtacaaaaccagttttggaaatgacaaagctagaatgtatttgtcggcatggtgagtatatgcatcttaaggaactgctagagattacagacaccactgagcgggataggtcattacgtcgtgcttttagcccttatacggcaatgattgatataacaggcagcgaagccgttgccctgattattttgttaaacctgacttatcgaaaaaaccaagttgatgacttgctggataaaaagctcgcaaaacaggctttaaaaagtgaagaccatattaataaatgtattaaggaaatagcgtggtttcatactcataatttaaagtaccctgacattagagtcagtaagcaaaatttagccgtagagcctccaacactgcactcttatgttttgagtagtgctaactatcctaaagcctatggctggtcacataactcagctaaagttaattttgctaaattatttgttagttactttaaatggcaaaatcaagtcagttggctggcacaagtattagctacgaactcggataactggaaatccgcatttacctctcttgggttatccgttaaggcatttaaaagtttatgtgtaaccgttaaaaattcattgcctgaagaggccattcccgactctgttgaccgctactctcgccaaattagaatgccttatcatgatggttacttagctgttacgcctgtaattagccatgttgttcaatcaaaaattcaacaggcggcaattgataaacgagcccgatttagcaatgtagagtttacgcgtcctgctgctgtcagtatgttagctgcttccttaggtggtgttattaatgtgcttaattaccctccttatatacgaagtaaatatcatggtttaagtaactcacgagcatttaaattaaataatgggcaaacagtatttaacgttgaggcactattaaagccggaattaattaaagccttagaaggtattatatttagtaataatgcgctggctcttaaacagcgtagacaacaaaaagtaaaaaatattaaagagctgagaaacacgcttttagaatggttttcacctgtatttgaatggcgcttggacgctattgagaatgggtatgacttagaacagcttgagagtgcttcagagcgactagagtataaaatactatcgctacccgacaatgaactcccttcgctaacgattcctttatttaggttactaaatgaaatgcttggcggtgtgagcatgacacaaaggtatgcttttcatcctaaattaatgagccctttaaaagcagctttacaatggttgcttgttaatcttacagatcaaaaacatgtactgattgaagaagatgatgaacattatcgctatcttcatttaagcggtatacgtgtgtttgatgcgcaagcattatcaaacccttactgctcaggtattccatctttaaccgctgtttggggtatgattcacagctaccaaagaaaacttaatgaggcgctaggaacaaatgtacggttcacatccttttcttggtttattaggaattattctgctgtagcaggaaaaaaacttcctgaactgagccttcaaggcgctcagcaaagtaggctcaagcggccaggaattatcgatggcaaatactgtgatttggtatttgatttaataatacacattgatggttatgaagatgacttacaggcagtagatagtaagcctgacattttgaaagcgcattttccatctaactttgcaggtggtgttatgcatcagcctgagcttaactcaaatataaattggtgctgtttatatagtaatgaaaatcagttatttgaaaagttaaggcgactccctttatctggttgttgggttatgccaactgagcacaaaatacaggatttagatgagctactcttattattaaatagtgactctaaactaagcccatctatgatgggatatatgttactcaccgaaccgatggctagagttggatcacttgaaagactgcattgttatgctgaaccagcaataggagtggtgaaatacgaagcggccactagtgtaaggctaaaaggtattggtaactattttaatagcgctttttggatgctagatgcacaagaaaagtttatgctaatgaaaaaagtttaaccggaaaatacttaatggagctctgtaatatattaaaatatgatcgctcgctttaccctggtaaagctgtgtttttttataaaacggctgactctgattttgttccactagaggctgatattaataaaattcgaggccctaaatctggttttactgaagcattcaccccacagttttccccaaaaaacatctcacctcaggacttaacacataataatatattaactctcgaagagtgttatgtacctccaaatgtggagcatatattttgtcggttttctttgagagtacaggctaactcgttggtcccttcaggctgtagtgatccagaggttttttctttattaaaagagttggcagaaacatttaaagaatgcggtggttataaagaactagcagtaagatattgtcgaaatattttgataggtacatggctttggcgtaatcaaaacaccggcaacactcaaattgaaattaaaaccagcaaagggagttgttatttaatcgataacactcgtaagttagcttgggaaagcaaatgggcttctgatgatctaaaagtattggaagagcttagtaatgaaattgagagcgcattaactgatcccaatgtgttttggagtgctgatataaccgcgaaaatagaagcctcattttgccaagagatttacccaagccaaatccttaacgacaaggttaagcaaggagaggcctcaaaacagtttgtaaaagctaagtgtgcagatggccgttacgctgtaagttttaattcagtaaaaataggagcagcccttcagtcaatagatgattggtgggatgaggatgcaagtaaaagattacgagtgcatgagtttggtgctgataaagaaataggggttgcccgacgtcctcctgattctgaacagaatttttattctattttcaaaaatacggaatggtatttgtcagcccttaaaaattgcattactaataaaaatgaaaaaatagacccagctatttattacttattctctgtattgattaagggcggaatgttccagaaaaaagcagaggctaaaaaggcgtaattatgcaaaggtattacttcacagtccactttttaccaaaacaagctaatctagcgctgcttactggccgttgtatttctattatgcatgggtttattttgaagcataatattgaaggaatgggggttacgtttcctgcatggtcggactcatcaattggtaatgaaattgcttttgtttacacggacaaggagattttaaatacccttaaagatcaggcatattttgtggacatgcaagattgtggcttttttaaagtaagccaagttttagctgtacctgacagctgcgaagaagtacgttttatacgtaatcaggcggtagcaaaaattttcacaggtgaaagtagaagaagattaaagcgcctgcaaaaaagagcgttagcaagaggtgaagattttaatcctaaaaagatcgaagctccccgagagattgatattttccatagagtggctatgactagtaagagttcacaagaggattatattctgcatattcaaaagcaagatgttgactgccaagctgagccatactttagtaattatgggcttgcctcaaatgaaaagtttaaaggcacggttccggatttatcaccctcaatagatagaaattaacctttaataaggagatatagcatgtatatacgcaacttgagaaagccatctccaaataaaaatgtatttaaatttgcgagcactaaagttagtagtgtagttatgtgtgagagttcattagagtttgatgcatgttttcatcatgaatataacgatttgatagagagttttgggagtcagcctgaaggctttaaatatgagtttatgggtaaaagtttaccttacacaccagatgcactgatttcatatacagataaaacccaaaaataccacgaatataagccctattctaaaattgcttctccactatttagagctgaatttgctgccaaaagagctgcatcattaaaattggggattgatcttgttttagtaactgataggcaaattagggtaaatccaatattaaacaacttaaagttattacaccgctactcaggtgtttatggtatcagcggcattcaaaaagagttgctcagttttattcataaatcaggggtaatcaagctaaatgatataagctctcaggttgggataccaattggtgaaacacgatcttttttatttgggctcatgcataaagggttggttaaggctgatctagggtgtgatgatttaactaataatccaacattatgggctacaccatgactgacttttttaatgaatttgatgaaagcctggtaccattaaagccacaaacgcccacacaatacgtcaaattagatgatgccaacttaatccagcgtgatttggataccttttcagatacctttaaaaaccaagcactacaaaggtataagctaattagcactatagataaaaaactttcacgcggctggacccaacgaaatttagatcctattttagatgagctttttaaaggaggtgacgtagttcggccaaattggcgaactgttgctcgttggcgcaaaaaatatatcgaaagcaacggtgatatagcctcccttgctgataaaaaccacaaaatgggaaacagaactaaccgtataaaaggggatgataaattttttgataaagcattagaacgatttttagatgctaaaagacctactatagcaactgcatatcagtactataaagaccttattgttattgaaaatgagagtattgtcgaaggcaagattccaataatatcctacaatgcgtttaataaaagaatcaaagcaatacccccatacgcggtcgcggtcgcaaggcatggtaaatttaaagcagaccaatggtttgcttactgcgctgcgcacgtacccccgacaagaatattagagcgtgtagagattgatcatacaccacttgatttaatcctacttgatgatgagttacttattcccataggaagaccttacctaacattacttattgatgtatttagtggctgtgttcttggttttcatcttagttataaatccccttcctacgtatctgctgctaaggctattactcatgcgattaaaccaaagtctcttgatgctctgaatatagaactacaaaatgattggccttgctttggtaaatttgaaaatttagttgtagataatggtgctgagttttggtctaaaaacttagagcatgcttgtcagtcagcaggaataaatatccaatataaccctgtgcgcaagccttggctaaaaccctttatagagcgtttttttggggtgatgaatgaatatttcttacctgaattaccaggaaagacattttcaaatattttagaaaaagaagagtataaacctgagaaagatgcaattatgcgcttctcaacttttgttgaagaatttcaccgctggatcgcggatgtgtatcatcaagacagtaattcacgtgaaactcgaatcccaattaaacgttggcaacaagggtttgatgcatatcccccattgaccatgaatgaagaggaggaaacgcgtttttcaatgttaatgcgcatctcagactcaagaacgttaacgagaaatgggtttaaatatcaagagttaatgtatgactcaacagctttggctgattatcgtaaacattatccgcaaacaaaagaaactgtaaaaaaactgattaaagtagaccctgatgacatctcaaaaatttatgtttatttagaagagttagaaagttatctcgaagtaccgtgtacagatcctaccggctatacggatggtttaagtatctatgagcataaaacaataaaaaaaattaacagggaagtcatacgggaatctaaagatagtttgggcttagcgaaagcacgcatggctattcatgagcgagtaaagcaagagcaagaagttttcattgaatcaaaaactaaagctaagataacagctgttaaaaagcaagctcaaatagctgatgtaagtaatacaggaacgagcactattaaggtttctgaagaaagtgcagcccctgtgcaaaaacatataagtaacgataattctgacgactgggatgatgacttagaggcatttgaatgaatgccttaacagagatacagatagagaagcttcggaactttagcgattgcatcgttatgcacccgcaaattaaaacaatttttaatgactttgatgaattaagattaaaccgtaaatttcagtcagaccaacagtgtatgctattaattggtgatacaggtgttggaaaaagtcataccattaatcactacaaaaaaagagttctagctacacagaattatagtcgaaacactatgccagtcttagtaagtcgtatatctagggggaaaggcttagatgctactttagtccaaatgctggcagatctggagctatttggaagtagtcaaattaaaaagcgaggctacaaaacagaccttactaaaaagctcgtagagagcttaattaaagctcaagtagagctactcatcattaatgagtttcaggagttaatagagtttaaaagcgtacaagaacgacaacaaattgcaaatgggttaaagtttattagtgaagaggccaaagtgccaatagtactggttggtatgccttgggctgcaaaaatagctgaagaacctcaatgggcttctcgcttagttagaaaaagaaaacttgaatactttagcctaaaaaatgacagcaagtactttcgccaatatttgatggggttagctaagaaaatgccatttgatgtacctcctaagctcgaaagtaaaaataccacaatagcgttgtttgctgcatgtcgaggtgagaatcgagcccttaaacatctactgttggaggctttaaaattagcactaagttgtaatgagtatcttgaaaataaacattttattactgcttatgacaagtttgatttttttaatgataaggaaaaactaaaatcaaaaaatccttttaaacaagacattaaagatattgaaatttatgaggtaatcaaaaactcatcttataacccaaatgcattagacccagaagatatgctcacagatcgagtgtttgcaatagtaaagtaa

SEQ ID NO: 379 - DNA, 8326 bp, synthetic construct
  source 1..8326: mol_type = other DNA
atgcattttttagttcaaacaaaactttatcctgatgaggctcttgaaagctatttgctaaggcttgctagggataactcatacgatggctatagtgagcttgctgatattttatggcaatggcttgtagagcaagatcatgatcttgaaggtgcgttgccgttagagctgggtaaagttgatgtttatcatgctaggcaagcgagtagctttagaataagagcgctcaagttggtagctcaattagctgatgtaaacgctggtaatattcttgcgcttgcatggcggcgcagtaattttaaatttggcaacttagtagcagtaagccgtaatgagcagacaattcctcttgagttacttcgcactgataatatacctgtttgcattgaatgcttgtttgaatcttcttacgttccttttcattggcatttaaagccctataagacgtgccataagcataaatcacaattaactacacattgtaaggaatgccataacttaattgattacagagcttctgaggagtttttagagtgcagttgtggttgtaaactaaccaatagtgaacagttaaacgatgcagactttaaaattgcatttgcgcttgcaagtagtaacagccataaaatagtggggttaatatcttggtttgcgaaggttaagcaacttgatgtaagcgatgctgactttaaccgtacttttgttgattactttagtacttggcctgaaagccttactactgaattagatttactcacaaacaatgcgcgcctcaagcaacttaacccttttaataaaactaagttcaactctgtttatggaaatgtgatccgtgatggtcaaatagctgcaacaagtaaccgtaaaaacaaagtacttgatgaactaattaaatattttgttgaattagttgatagtaatcctaaaactaaacatccaaatattgcagatttactgctttgtacttttgataccgcagtattattaaacaccaccacagagcaagtttataggcttcatcaagaaggctttttaaactgcgcttacccacaaaaaaagcacgaacagctcagagctgatagtcatgttttttatttacgccaagtgattgagctacagcaagcattcgcagctgaaacgcctcaaacaaaaaaacaatttatagcgccgtggtaacttatgaacttacaagatgcatttgcgattgaatcacttaaggaaaaaaccacagcacttagaaagttgtttactccatatatgtctcatgttgcggtagatggctttgaagaacaagcgctgactgtgctcattaacctagtttataaacgaagtgagattgatgatttaacaagtacaagaaccgctaaaagtgtattacgtgatgaagtgttactgagtaaatgtattaacgaagttaaatggtttcatactcataatttaaaatatcctgatatacgcgtaagccatcaacgtttaattagtaaggtagtaagtgaagatattgcgggtatttgtagccggtcattacctttaagttttggatggtcgcacaacagtgctgaaattaatcatgcaaagttatttttaacctcatttacttggcaaggtgaagtaacttgtttagcaaatttactaataaatgaggagcctgtttggattaatttaataaggacatacgggtttactaaaaaggcggttttaggcatcgcgggtaaaataaaacagcttttgccagtggcagaactcccattagaagtaagctctttttcaccacaattacaaatgccatttcagcaaagctaccttgcggttacgcctgtagtaagtcacgcaatgctggctaaaattcagcaattaacaacagatcgtaagttaaattttggtttagttgagcactcaagacctgccaatgttggcgatttagcaagctcagtaggtggtaatattagagtgctgcgttactttcctaaaacatattcaaaggctgttaactgctctgaagtattcaataatgatagtgagaaagcatttaaaattcgtgcgctattaaacagtcaatttcaacaggcgcttttggtattggtcggtattaaacagtttaatacgttaaggcaaaagcgattagcgcgagtagcggctattaggcaagtacgtgttagcttgcagttgtggctggataacattctggaagctaaaaataacgctcaagggcaagcctaccctgagtgggcaaagcattacttagatcagagtattactaactgcattagccaatttagtaacgtactaaatgagagccttggtaatttaagtaagctcaaacgctttgcgtatcaccctaatttaatgggggtgtttaaaacgcagttaaactatgtgtttactcactgtattcctgatgaagaaacattaaatgatgagcaaatagtgtatgtgcattgccaagatatgcgagtgtttgatgctgaggcaatggctaatccgtatattcaaggtatgccgtcacttacagctttaaatgggcttgctcataactttgagcgtaagctaaaaaattttatagacccttcaattaagtgtattggtagtgccattaacattgaaagttatcaactacatacaggtaaaccattacctgaaccaagtaagttaaaacaagttgctggccgtagtcatgtcataagatcaggaattatcgataaacctaaatgcgatataacactcgatttagtctttaggctttttgtaccaaacattaagctgttagataagttaaatagtcagcttgtgaaacccgcactaccatctatgtttgcaggcgggactatgcatccaccttcgttataccaaaatattgactggtgccatttacatactaaaccaagtgagctgtttaaaaatataaaggcaaaatcgttaaatggcagttggttgtacccttcaaaaaaagtagtcaaaagttttgaacagttgattgatgcgcttaacggtaactttaatttaagacctgctgccattggttttgctgcgcttgaagaacccataaagcgagatgtagccttacatgaataccattgttatgctgagcccgtaattgggcttttagagtgtgttagcaatacatcagttaagtacgcaggggctaagcagttcttccatgacgcattttgggttatggatgttcaaaaagagtctatgcttatgaaaaagtctaagtttgagtatgaataatgcaattacctcggcatttaagttacacgcgttcgctttcacccagtaaagcggtatttttttataaaacatcggagtctgattttgaaccgctgcaaatagagcaaaataagcttgttgggcaaaagtcagggtttggcgatgcgtatcaaaagcaaaatgtggctaaaaatttagcgccacaagatctagcgtttggaaacccacaaacgattgatgtgtgctacgtacctccagcagtaaatgagctattttgccgtttttcactcagggttgaggctaatagcaatgaaccacacgtttgtgatgaccctaaagttatttattggttaaaacggttttttgaaacctacaaaaaacacaatggtcttaatgaagttgcaactcgctatgctaaaaatatactgatggggaactggctttggcgtaaccgccaatcaccaaatgttgatattgaaatccttactgaacatgcagccccgatcattgttgaaggtgcacaaaaactaaaatggcaaggcaactggcaaaacaatcaaacagcattaataacattatcagaagctattcaagaagggcttagcaatcctcaaaattattgttatttagatataaccgcaaaaattaaaaatgcatttagccaagaggttcaccctagtcaaaagtttgtagacaatgttgaacaaggcatgtcatctaaacaacttgcatacactcaagtcggcgataaaaaagcagccagtttaaactcacaaaaagtaggggctgcgattcaaactattgatgattggtatgagggaggttacaaacctttacgcactcacgagtatggtgcagataagcaaatattagttgcacatagaacgcctaagagccattcagacttttattcattacttccgcgcattgccttgcatattaagcacatggaaaagcatggtttagagcaaagtgaagaatcaaacgcagttcactttattgcagcagtgttgatcaaaggcggcttgttccaaaggagtaaggcatgaagcgctattattttactattacttatttacctaaaaattgtgatgtaagcctccttgcagggcgttgtatcggcatattgcatgggtttatgagttcgcgtgaaattagtaatataggtgtgtgttttcctaaatggaatgagcaagagataggtaatgaattggcgtttgtatcgacagataaaaagcaattaaccaatctatctcagcaaagctattttgagatgatggctcaggataaattatttggcttatcaaaaatactcgaagtaccaacaaaccaaaatgaggttatgtttattcgcaaccaatcagtagctaaggcttttgttggcgaaaagcaaagacgtttaaaacgcgctaaaaaacgagctgaagccagaggtgaagtttataatcctgaatatcaatttgaggcaaaagacataggccattttcattcaatacctgtatcaagcaaagccaacggccaaagttatgttctgcatatacaaaaaattgaaaatactaatgcgacagaaaatcaatttaataattatggctttgctacaaatcaaacatttcaaggtacggttccttctttgaatacccaataacctttaataaggagatatagcatgtacagaagaaaactcaaacactcccgtgttaaaaaccttcataaatttgctagtcaaaaaaataaatctacctgtttagttgaatcctctttagagtttgatgcctgttttcattttgaattttcaccatcaatagccgcatttgaggcacaaccactaggttatgaatatgagtttgataaccgtatttgccgttacacacctgactttttacttacccacacagacggcacgcaaaaatttatagaagtaaaaccgcaaagcaaaattgctgacgaggactttcgtgcacgttttattgaaaagcaaaccatcgctaaacaagatggacgcgacttaatactggttactgataaacaaatccgtgtatacccaacactcaataacttaaaacttttacatcgctattctggttttcagtctttaacagagctgcaagcatcggtgctcgagcttgttaagcaatacggctctattaaagtgggccagttagttaactttttaaaagtaactgccggtgagctacttgctactgtgctacgcttattatcactagggcagttatttgccgacttaactacaaatgaaatatcaatagaaacagcaatttggtctaacaatgtttaatgacggtttgtttgatgatgagtttaaccagccattaccaaaagtagaaaccaaactacctcaaaattacgccaaagatttacaagcccttcctgaaaaaattaaaaatacaacatttgctaaacttaaatatattcaatggcttgaggctaatattcaaggtggctggacacaaaaaaaccttgagcctttattgaaagtaatgcctgaagttgagggtgaaaaaaagcctagctggagaacagctgcacgatggtatagcgcttatacaaatgcagataaaaatatcatggcgctaataccaagccatcaaaaaaagggtaacagggagcgcgatacagccaccgataagttttttgaaaaagcacttgagcgttacttagtaaaagaaaagccatcagtggcttctgcttacaagtattacgcagacttagttatcattgaaaacgacagcgttgtgggcagtgttttaaagcctttaacatacaaagcgtttaaaaatagaatcgataatttaccgcaatacgacgtgatggtttctcgctatggtaagcgtcttgctgatattgcttttaataaagtagaagggcatacacggcctacccgagtactcgaaaaagttgaaattgaccatacaccgcttgatcttattttattagatgatgagctacatatcccgcttggtaggccaacacttaccatgttagtcgatgtgtatagccattgtattgttggcttctactttagcttcagcgagcctagctatgatgcagtaaggcgagcaatgctaaatgcaatgaaacctaaaagtgatgtggcaaaactatacccagatacgataaatgagtggaaatgtgctggcaaaattgaaactctcgttgttgataatggcgctgaattttggagtaacagccttgaacttgcttgtgaagaaattggtattaatactcaatataaccctgttgcaaagccgtggttaaaaccctttgtagaacgtatgtttggcacaattaacactgaattattagaccctgttcctggtaaaaccttttctaacattttacaaaagcatgaatacaatcccaaaaaagatgcaatcatgcgctttacaacctttatgcagctattccataaatgggtagtagacgtttaccatcaagatgccgatagccgctttaagtacatacctagccaactatgggagcaaggctttaatacgttaccgccaacagtgctgagtaatgctgatcttcaacaattagatgttgtgctcagtatttcaaaccatagggtgcttcgtaaaggtggaatacggctagaaaatttaagctacgacagtactgaactagccaactatagaaaacagtttagccataaagtatctcaagaagttttaattaaattaaaccccgatgatatttcttatatatatgtttacctcgataagctagagcattacataaaagtgccatgcatagatccaaacggttacacccaaaatttaagtttgaatcagcataaaataaatatacgtattcatcgcgattttatttccggatctatcgataatgtaggcttagcaaaagcgcgtatgtttattcataataaaattcaaaacgagtttgaagagttaaaaaatgcaccaaaacactcaaaagtaaaagggggtaaagcattagctaagcatcaaaatgtaagtagtgactcacaaaaatcaatagctcagagcgagccattagaacccaaaaaggttacacctaaagagcaaccaacagatagctgggatgactttatttcagacctagatggattttaattatgctgaccgataaacaaaaagcaaaacttaatgaatttcgcgatgtatttattgaatacccaataataactactgtatttaacgactttgacagattaagacttggtaaaggattagcgggcgaaaagccctgcatgctgttaaatggcgatacaggcacaggtaaaacagcactaataaaacagtataaagaacgccatttaccgcaatttattaatggagtgatgaaccaccctgtattagtaagccgcatacctagtaacccgacactagaatctactttagccgagcttcttaaagacttagggcaagtaggtagtacagagcgcaagctgagaataaacggtacgcggttaacgacatcattaataaaatgcctaaaaacgtgtggcacagagcttataattattgatgagtttcaagagctgattgagcacaaccaaggtaaaaagcgccgcgagattgctaatcgattaaaatacattaacgatgaagcgggtgtatcgattgtattggtgggtatgccgtgggcagaaaaaatagcagacgaaccccagtggtcatcgcgtttattagtaaggcggcagctgccttattttaaattatcagaaaacccaaagcattttgtacagttaataattggcctagctaaccgtatgccattcaccgaaaagccaaaattaagtgagcaagcaacagtatttgctttgttctcattgtcaaaaggctgttttagaactcttaaatactttttagatgatgccgtactttatgcattaatggataacgcgaaaaccctcacaaccaagcatctagttaaagcatttggagtactgtttcctgatgtaccaaacctatttaccttgcccgttgcagaaattacagcaagtgaagttgagcgctattcactttataaacttgaaagcgcccaagatgaagatccgtttatagcgactaagtttactgaccaaatgccgattagtcagttgttgaggaagtaa

SEQ ID NO: 380 - DNA, 27104 bp, synthetic construct
  source 1..27104: mol_type = other DNA
atcgatgcataatgtgcctgtcaaatggacgaagcagggattctgcaaaccctatgctactccgtcaagccgtcaattgtctgattcgttaccaattatgacaacttgacggctacatcattcactttttcttcacaaccggcacggaactcgctcgggctggccccggtgcattttttaaatacccgcgagaaatagagttgatcgtcaaaaccaacattgcgaccgacggtggcgataggcatccgggtggtgctcaaaagcagcttcgcctggctgatacgttggtcctcgcgccagcttaagacgctaatccctaactgctggcggaaaagatgtgacagacgcgacggcgacaagcaaacatgctgtgcgacgctggcgatatcaaaattgctgtctgccaggtgatcgctgatgtactgacaagcctcgcgtacccgattatccatcggtggatggagcgactcgttaatcgcttccatgcgccgcagtaacaattgctcaagcagatttatcgccagcagctccgaatagcgcccttccccttgcccggcgttaatgatttgcccaaacaggtcgctgaaatgcggctggtgcgcttcatccgggcgaaagaaccccgtattggcaaatattgacggccagttaagccattcatgccagtaggcgcgcggacgaaagtaaacccactggtgataccattcgcgagcctccggatgacgaccgtagtgatgaatctctcctggcgggaacagcaaaatatcacccggtcggcaaacaaattctcgtccctgatttttcaccaccccctgaccgcgaatggtgagattgagaatataacctttcattcccagcggtcggtcgataaaaaaatcgagataaccgttggcctcaatcggcgttaaacccgccaccagatgggcattaaacgagtatcccggcagcaggggatcattttgcgcttcagccatacttttcatactcccgccattcagagaagaaaccaattgtccatattgcatcagacattgccgtcactgcgtcttttactggctcttctcgctaaccaaaccggtaaccccgcttattaaaagcattctgtaacaaagcgggaccaaagccatgacaaaaacgcgtaacaaaagtgtctataatcacggcagaaaagtccacattgattatttgcacggcgtcacactttgctatgccatagcatttttatccataagattagcggatcctacctgacgctttttatcgcaactctctactgtttctccatacccgtttttttgggctagcgaattcgtaggggttactgaaaagtgagcgggaaagaagagtttcagaccatcaaggagcgggccaagcgcaagctggaacgcgacatgggtgcggacctgttggccgcgctcaacgacccgaaaaccgttgaagtcatgctcaacgcggacggcaaggtgtggcacgaacgccttggcgagccgatgcggtacatctgcgacatgcggcccagccagtcgcaggcgattatagaaacggtggccggattccacggcaaagaggtcacgcggcattcgcccatcctggaaggcgagttccccttggatggcagccgctttgccggccaattgccgccggtcgtggccgcgccaacctttgcgatccgcaagcgcgcggtcgccatcttcacgctggaacagtacgtcgaggcgggcatcatgacccgcgagcaatacgaggtcattaaaagcgccgtcgcggcgcatcgaaacatcctcgtcattggcggtactggctcgggcaagaccacgctcgtcaacgcgatcatcaatgaaatggtcgccttcaacccgtctgagcgcgtcgtcatcatcgaggacaccggcgaaatccagtgcgccgcagagaacgccgtccaataccacaccagcatcgacgtctcgatgacgctgctgctcaagacaacgctgcgtatgcgccccgaccgcatcctggtcggtgaggtacgtggccccgaagcccttgatctgttgatggcctggaacaccgggcatgaaggaggtgccgccaccctgcacgcaaacaaccccaaagcgggcctgagccggctcgccatgcttatcagcatgcacccggattcaccgaaacccattgagccgctgattggcgaggcggttcatgtggtcgtccatatcgccaggacccctagcggccgtcgagtgcaagaaattctcgaagttcttggttacgagaacggccagtacatcaccaaaaccctgtaaggagtatttccaatgacaacggctgttccgttccgtctgaccatgaatcgcggcattttgttctaccttgccgtgttcttcgttctcgctctcgcgttatccgcgcatccggcgatggcctcggaaggcaccggcggcagcttgccatatgagagctggctgacgaacctgcgcaactccgtaaccggcccggtggccttcgcgctgtccatcatcggcatcgtcgtcgccggcggcgtgctgatcttcggcggcgaactcaacgccttcttccgaaccctgatcttcctggttctggtgatggcgctgctggtcggcgcgcagaacgtgatgagcaccttcttcggtcgtggtgccgaaatcgcggccctcggcaacggggcgctgcaccaggtgcaagtcgcggcggcggatgccgtgcgtgcggtagcggctggacggctcgcctaatcatggctctgcgcacgatccccatccgtcgcgcaggcaaccgagaaaacctgttcatgggtggtgatcgtgaactggtgatgttctcgggcctgatggcgtttgcgctgattttcagcgcccaagagctgcgggccaccgtggtcggtctgatcctgtggttcggggcgctctatgcgttccgaatcatggcgaaggccgatccgaagatgcggttcgtgtacctgcgtcaccgccggtacaagccgtattacccggcccgctcgaccccgttccgcgagaacaccaatagccaagggaagcaataccgatgatccaagcaattgcgattgcaatcgcgggcctcggcgcgcttctgttgttcatcctctttgcccgcatccgcgcggtcgatgccgaactgaaactgaaaaagcatcgttccaaggacgccggcctggccgatctgctcaactacgccgctgtcgtcgatgacggcgtaatcgtgggcaagaacggcagctttatggctgcctggctgtacaagggcgatgacaacgcaagcagcaccgaccagcagcgcgaagtagtgtccgcccgcatcaaccaggccctcgcgggcctgggaagtgggtggatgatccatgtggacgccgtgcggcgtcctgctccgaactacgcggagcggggcctgtcggcgttccctgaccgtctgacggcagcgattgaagaagagcgccggcggcatttcgagagcctgggaacgatgtacgagggctatttcgtcctcaccttgacctggttcccgccgctgctcgcccagcgcaagttcgtcgagctgatgtttgacgacgacgcgaccgcaccggatcgcaaggcgcgcacgcggggcctcatcgaccaattcaagcgtgacgtgcgcagcatcgagtcgcgcctgtcgtcggccgtgtcgctcactcgcttgaaggggcacaagatcgtcaacgaggacggcacgaccgtcacgcatgacgacttcctgcgctggctgcaattctgcgtgacgggcctgcaccatccggtgcagctccccagcaacccgatgtacctggacgccctggtcggcggacaggaaatgtggggcggggtagtgcccaaggtcggccgcaagttcgtccaggtggtcgctctcgaaggcttccccttggagtcctatcccggcatcctgacggcgctcggcgagctgccctgcgagtatcggtggtcgagccggttcatcttcatggaccagcacgaagccgtgaagcacctcgacaagttccgcaagaagtggcggcagaagattcgcggcttcttcgaccaggtgttcaacacgaacaccggcccggtcgatcaggacgcgctttcgatggtggccgatgctgaggcggccattgccgaagtcaacagcggcatcgtggccgtgggctactacaccagcgtcgtcgtgctgatggatgaggaccgcacgcgcctggaagctgcggcccgcgatgttgaaaaggccgtcaaccggttgggctttgccgcgcgcatcgagtccatcaacaccctggacgccttccttggtagtttgccgggccacggcgtggaaaacgtccgccggccgctcatcaacacgatgaacctggccgacctgctgccgaccagcaccatctggaccggcaacgcgaacgcgccatgcccgatgtacccgccgctgtcgccggcgctcatgcactgcgtcacgcaaggatcaacgccgttccggctgaacctgcacgtgcgcgacctcggccacacctttatgttcgggccgaccggcgcaggtaaatcgacgcacctggcgatcctcgccgcgcagctccgtcgctatgccggcatgtcgatcttcgcctttgacaagggcatgtcgatgtacccgctggccgccggcatccgtgcggccacgaagggcaccagcggcctgcacttcaccgtggcggccgacgacgaacgcctggcgttctgcccgttgcagttcctgagcaccaagggcgaccgtgcttgggcgatggagtggatcgacaccatcctggcgttgaacggcgtcgaaacgaccccggcccagcgcaacgaaatcggcaacgcgatcatgagcatgcacgccagcggcgcgcgcacgctctccgagttcagcgtgacgattcaggatgaggcgatccgcgaggcgatccgccagtacaccgtcgatggcgcaatgggccatctgctcgacgccgaagaggacggcttggcgctgtccgactttacagtgttcgagatcgaagagctgatgaacctcggcgagaaattcgccctgcctgtgttgctctacctgttccgccgtatcgagcgcgccctgacgggccagccggccgtcatcatcctggacgaagcctggttgatgctcggccacccggcattccgcgcgaagatcagggaatggctcaaggtgctgcgtaaggccaactgccttgtgctgatggcaacgcagagcctgtccgacgccgccaacagcggcatcctggacgtgatcgtggaatcgaccgcgaccaagattttcctgccgaatatttacgccagggatgaggacacggcggccctgtaccgccgcatgggcctgaacgctcgccagatcgagattctggcccaggccgttcccaagcgtcagtactactacgtgtcggaaaacggccgccgtctctacgacctggcacttggcccgctcgcgctcgcgttcgtcggcgcatccgacaaggaatccgtcgccatcatcaagaacctggaagccaagttcggcgaccagtgggtggatgaatggctgcgtggccggggcctcgcccttgatgaatacctggaggcagcatgagttttgcagacacgatcaagggcttgatcttcaagaagaagcccgcaacggccgcagcagcggcgacgccggccgcgaccggcccgcaaaccgacaacccgtacctgacggcgcggcgcacctggaacgaccacgttggttccgttgtgtcgcaaaagcagacctggcaggttgtcggcatcctttcgctgatgatcgtcctcgcggcggtcggcggcatcatccacatcggcagccagtcgaagttcgtgccctatgtctacgaggtagacaagctcgggcagacggccgccgtggggccgatgaccagggcgtcgaaagccgatccgcgtgtcattcacgcctcggtggctgagttcgtcggcgatgctcgcctggtgacgccggacgtagctttgcagcgcaaggccgtctaccgcctctatgccaagctcgggccgaatgacccggccaccgccaagatgaacgaatggctcaacggcaccgccgacgccagcccgttcgctcgcgcggccgtcgaaacggtcagcaccgaaatcacttccgtaatcccgcagacgcccgacacctggcaggtcgattgggtcgagacgacgcgcgacaggcaaggcgtggtgaaaggccagcccgtgcgcatgcgggccttggtgacggtctacgtcgtcgagccgacggcggacaccaaggaagaacaactgcgaaacaacccggccgggatctacgtccgggacttctcctggtcgagacttctgtgaggcactgaattatgaaaaaggaactgtttgctttggtcctggccgcgtccgttagcgtgcctgcatttgccgccgatcccggcgcggacctgactgacctctatttttccggcaagaacccggagctgaccgcgcaagagcgggcggccatcgccatcgccaagaagtgggaggcgggtaccgccggcatgcggccggtggccggccccggtggttcggtgcgcttcctgttcggcgcgcagcagccgagcatcgtatgcgccgtgctgcaagtgtgcgacgtggccctgcaacccggcgagcaagtcaactcgatcaacctgggcgacaccgcccgttggacggtcgagccggccattaccggcagcggcgcgaacgaaacccagcacctcatcatcaagccgatggatgtgggcctggaaaccagcctggtcgtgaccacggaccgccgcagctaccacatgcgcctgcgctcgcatcgcacgcagtacatgccgcaggtgtcgttcacctacccggaagatgcccttgcgaagtgggacgccatcaagaaccgcgaacagcgggatcgcgtcgagaaaaccattccgcagaccggcgagtacctgggcaacctgagcttcaactactccgtcagcgggtccacgtcgtggaagccggtgcgcgtctacaacgacggcaagaaaaccatcatccagatgccgcactcgatggaacagaccgaagcgccgacgctcctggtcgttcgcagggagggcggcctgttctccgacgatgaaacggtgatggtcaactaccgggtccagggcgaccgctacatcgtcgatacgattttcgacaaggccatcctcatcgcgggcgtgggcagcagccaggaccgcgtgaccatttcaagggggaactaaaccatgcgtaagattctgaccgtcatcgcactcgcggccacgttggccggctgcgcgacctccaagtacggcagcttcgtccaggacgcgccggccgcctacaaccagaccattgcgaccgacgcggtgaagcagctcgtcaagctctacccgccggcgcaaaccaagctggaattgcagcaggctacgcccgatccgttcggcattgccctggtcactgaccttcgcgcccagggctatgctgtcatggagtacaagcccgacggcaacgcggccgcagctccggctgctgcgtcctcggccgctgcgaagccggcaacgccgcaagcccagggcggctatccgctgcgctacgtgctggaccaattcagcgacagcaacctgtatcgcctgaccgtcatggtcggctctcaatcgctcacgcgcgcctacctcgcccaaaacaacacgatggtcccggccggcgcatgggttcggaaggagtaagccaatgagcgaagatcaaatggcaccggacgcatcgccagatgcggtcaagccgaaaagcggggttcgccgcgtcaacaacatgccgatgtacctcatcggcggtgtgctcggcatcttcctgctggtgatggccctggttgctgcggatcgcgctgcgcagcagaaccagccgggagctgcgaaggctgagaaggccggcagcaccagcatgtttgccgacgaaattgccggcaaacagcaggacggcatcatcaaggccaagccgctggagattccgccggaacaaaccgcccagcaaccgacgacggagctgacgccagccccggcgcagggaacgactatcacggtcgcacggcccgagaacctggaccagcccccgacgccgccgcagggtgcgcgcaacgaggacctggaccgcatccgcatggcgaagttgcagatgctggaagaggcgatcaaggccaagacgacggtgcgcatcgacgcgccgcgcagccagggcagcgccggcggcggtgctccgcagggccgcgaggaaacccttgcgcgcatccaggagctgcgtcggcaggctgagaacgcccgcgccaccgatccgaccgccgcctatcaggccgcgcttgcgcaggctcgcacgatgggcggcgcggcagggggtggcggtatgggcggctcgggtgcgccgaccctcgtgcagacctcgaaccgcagtggtggcggcgctggctatgggtcgttcgacaaccgcagcgagggcgaccgttggcggctcgactcccagccggaagcacctgcaacgccctatgtgctgcgcgctggcttcgtcgttccggctacgcttatctcgggcatcaactccgatctgccaggccaaatcatggcccaggtatcgcagtcggtgtacgacacggcgaccggcaagcacatgctcatcccccaaggctcgcgcctggtgggcagctactcgaacgatgtggcctacgggcagaagcgcgttctggtggcatggcagcgcatcatcttccccgacggcaaggcaatggacattggggccatgccgggcggcgatagcgctgggtatgcaggcttcaacgacaaggtcaacaaccactacttccgcaccttcgcatcggcattcctcatgtcgggcgtcgttgcgggcatcagcttgagtcaggaccgtggcaacagcaacagcggttacggacgacaagacgcgggttccgcgatgagtgaagcgttgggtcaacagctcggccaagtaacggcgcagatgatcgccaaaaacttgaatatcgcgccgacgctggaaatccgtccgggctatcgcttcaacgtcattgtcacgaaagacatgacgttttctaagccctaccaggcgtttgactattaactccaaggagtaacttatgaagaagctcgctaagaatgttttagccgctaaagtagctctggtgctggccctctcggtcggcaccttggcggtcacgcctgcgcaagcgggcattccggtcatcgacggcaccaacctgtcacaaaccactgtcaccgcgattcagcaggttgcgcaggtccagaagcaaatcgaggaataccggacgcagttgcagcagtacgaaaacatgctgcaaaacacggtggccccggccgcctacgtgtgggaccaggcgcagtccaccatcaacggcctgatgagcgccgttgataccctgaactactacaagaaccaggcgggcagcatcgacgcttacctgggcaagttcaaggacgtgtcctactacaaggggtcgccgtgcttctccctgtcgggctgctcggaaagcgagcgcaaggcgatggaagagaaccgccgcctggcgtccgaatcgcagaaaaaggccaacgatgcgctgttccgtggcctcgatcagcagcagagcaacctcaagtccgacgccgccacgctggagcaattgaagggcaaggcgacgacggcgcagggccagttggaagccctcggctacgccaaccagttcgccagccagcaggccaaccagctcatgcaaatccgtggccttctgcttgcgcagcagaacgccatcgccacgcagatgcaggcccagcaggaccggcaggcccagcaggacgctgcgggcgcgaagctgcgcgagggttcgtaccgcgcaagcccgtctaagacctggtgaggggaggcgcgatgaagaaatccaacttcatcgcagttgccgcgctggccgccgtcatggcggccagcctggcaggctgcgacaacaagcccgacaccgacaagctgacctgcgccgatctgccgaaggtcacggatgccgctcaacgcgcggagctgttgaagaagtgcccgcgcggagaaccgggaggcttcaagcccagcgaaaagaaagagtggtgatgacgtatgaaaatccagactagagctgccgcgctcgcggtcctgatgctggccttgatgccggtagcggcatacgcccaaatcgacaattcgggcatcctcgacaacgtattgcagcgctaccagaacgccgcgagcggctgggccactgtcgtccagaacgccgcaacctggctgttctggaccttgaccgtgattagcatggtctggaccttcggcatgatggcactgcgcaaggccgacattggcgagttcttcgccgagttcgtgcggttcaccatcttcaccggcttcttctggtggctgctgaccaacggcccgaatttcgcgtcgtccatctatgcgtccctgcggcagattgcaggccaggcaacggggttggggcaggggctttcgccgtccggcatcgtcgatgttggcttcgagattttcttcaaggtgatggacgaaacctcgtactggtcgccggtcgatagcttcgtcggtgcctcgttggcggccgccatcctctgcatcctggccctggtcggcgtgaatatgcttctgctcctggcgtccggatggattcttgcctacggcggtgtgttcttcctgggcttcggcggctcgcgctggacctcggacatggcgatcaactactacaagaccgtcctcggggtcgccgcgcagctcttcgcaatggtgctgctcgtaggcatcggcaagaccttcctcgatgactactacagccgcatgagcgaaggcatcaacttcaaggaacttggagtgatgctgatcgtcggcctgatcctgctcgttctggtcaacaaggtgccgcagctcatcgccggcatcatcaccggcgcgagcgtcggcggtgctggtatcggccagttcggcgctggcacgctcgtcggtgcggccgcgacggccggcgcggcaatcgcaactggcggcgcatctatcgcggccggcgctgcggcggcggccggtggcgcgcaggccatcatggcggccgcgtcgaaggccagcgataacgtctctgccggcactgacattctgtcgagcatgatgggcggcggcggtggcggcggcggtggtagcgccggcaccagcggcggcgacggcggcggctcgggtggcggcggtggctcgggcggcggtgaaaccccgatggcctcggccgccggcgacaacagcagcggcgcacgcggcggcagttcgggcggcggctcgggtggtggccgttcgtctggcggtatcggtgccacggcggccaagggcggccggatcgcggccgataccgtcgccaacctggcgaaaggtgccggctcgattgccaaggccaaggccggcgaaatgcgcgcatcggcccaggaacgcatcggcgataccgtaggcggcaagatcgcgcaggcaattcgcggcgcgggtgcggcggcgcagaccgctgcaaccgtcgccgatagcaacagccaggcgcaggaacaacctgcaccggcacccgcaccgtcgttcgacgacaacagcctttccgcaagcaacaacagggaagcggccgccgacgcggattccgaagtggcgagcttcgtcaacaagcccgcccaatcctgaaacgactcttaggagctacgtaaggctgttttggcggatgagggcgcagtcagagcttgggcctgtcaaacaagcccagctaacgcaaaaacaagcccggcaacgccgggctttttcatctgcgcctctgcgattcataacgaggcccacaccaccagggcggccgcgaacaacaccatgccgccggcgatcatgttcatcatcgccacgcgccgcgcgtccgcgaccttggccgcgagctggcggccaaggccgtcgtcgatttccctgcggatcgcttcggccgcctgcgcggcgctgtccttcattaccttcgccattgcgtccttgctggccgccagggccgcgttcagcatccgctccgctttggccttggcgtcctcgccccaacgatgggcgatcccttccagctcttccttgaacgcggcaaggatttcctcttgcttggccgcactgtcggccatgagccgggcgttgatggtatgcaggatcagcaccgggtcgtcgcggccgacggcgatgccgtgcttggccgcaatctcccggatcagctcttcaatctggtcgctcatagcacggccgccgcgtcgagctgttcaaacaggccgcgccgcacgatcttgaggcgttgccgcgtcatgatcgtgagcgattcatcggccagcgcctggtcgaacgtcagccgctcttgcagcatgtcgctgaaatcgcggccgtaggtttcttccttgagggccggaatctggatgatggacgacacgcgggccttgttggccgtgtacgccttcatctgctcaaagctcttgccctcatgctcgataggcccccaatacgggttcagccagaccacgaaaagcgcttcggccgggaactggctggcgagctgggcgaagccgctcaccgtgtccaggagagcctggccgccggtgacgacggtatggatgaccagctcatgccccatttcttgcagcagagccggcacctggttgctgatgaggtaatgcgacagaggcacgaacgagctggcaccgttgtcgatcaccacgtcatccttggtcggcgcaatcagctcgaccagggtgtcgaagttgcgcgagttaatttcgtcgccggccatgatgttcagccggcggacgttcagggccttgtagccctcgaacgtcgcgttcaccgggtcggtgtcgatgcacaagggtgtctgccccttgtccatcttgtactgcgcaatgatcgcggcgatggccgacttgccgaccccgcccttgccctgcaaaaccatgtgaattttcgccattacagtagatcctttttgtccggtgttgggttgaaggtgaagccggtcggggccgcagcgggggccggcttttcagccttgcccccctgcttcggccgccgtggctccggcgtcttgggtgccggcgcgggttccgcagccttggcctgcggtgcgggcacatcggcgggcttggccttgatgtgccgcctggcgtgcgagcggaacgtctcgtaggagaacttgaccttccccgtttcccgcatgtgctcccaaatggtgacgagcgcatagccggacgctaacgccgcctcgacatccgccctcaccgccaggaacgcaaccgcagcctcatcacgccggcgcttcttggccgcgcgggattcaacccactcggccagctcgtcggtgtagctctttggcatcgtctctcgcctgtcccctcagttcagtaatttcctgcatttgcctgtttccagtcggtagatattccacaaaacagcagggaagcagcgcttttccgctgcataaccctgcttcggggtcattatagcgattttttcggtatatccatcctttttcgcacgatatacaggattttgcttaatttgaaaattggaatatccatcacataacgacatgtcgcagcaatttaatccatatttatgctgtttccgacctgacacctgcgtgagttgttcacgtattttttcacggtgtatccaacggcgtcagtaggcccacccgcgagcgggtgttccttcttcactgtcccttattcgcacctggcggtgctcaacgggaatcctgctctgcgaggctggccggctaccgccggcgtaacagatgagggcaagcggatggctgatgaaaccaagccaaccaggaagggcagcccacctatcaaggtgtactgccttccagacgaacgaagagcgattgaggaaaaggcggcggcggccggcatgagcctgtcggcctacctgctggccgtcggccagggctacaaaatcacgggcgtcgtggactatgagcacgtccgcgagctggcccgcatcaatggcgacctgggccgcctgggcggcctgctgaaactctggctcaccgacgacccgcgcacggcgcggttcggtgatgccacgatcctcgccctgctggcgaagatcgaagagaagcaggacgagcttggcaaggtcatgatgggcgtggtccgcccgagggcagagccatgacttttttagccgctaaaacggccggggggtgcgcgtgattgccaagcacgtccccatgcgctccatcaagaagagcgacttcgcggagctggtgaagtacatcaccgacgagcaaggcaagaccgagcgcctgggtcacgtgcgcgtcacgaactgcgaggcaaacaccctgcccgctgtcatggccgaggtgatggcgacccagcacggcaacacccgttccgaggccgacaagacctatcacctgctggttagcttccgcgcgggagagaagcccgacgcggagacgttgcgcgcgattgaggaccgcatctgcgctgggcttggcttcgccgagcatcagcgcgtcagtgccgtgcatcacgacaccgacaacctgcacatccatatcgccatcaacaagattcacccgacccgaaacaccatccatgagccgtatcgggcctaccgcgccctcgctgacctctgcgcgacgctcgaacgggactacgggcttgagcgtgacaatcacgaaacgcggcagcgcgtttccgagaaccgcgcgaacgacatggagcggcacgcgggcgtggaaagcctggtcggctggatcaagcgcgaatgcctgccggagctgcaagcggcgcaatcctgggaggacctgcaccgcgtcctgcgggaaaacgggcttaagctgcgcgagcgcggaaacggcttcatcttcgaggccggcgacggcacgacggtcaaggccagcaccgtttcgcgcgacctgtccaagccgaagctcgaagcccgattcggggcattcacgccagccgagggcggcgaagccccccggcggcgggagtatcgagcgaagccgctcaagacccgcatcgacaccaccgagctatacgcccggtatcagtctgaacgccaggaaatgggggccgtgcgcaagggcgagctggacacgctgcgccggcgtcgtgaccgcctgattgaagccgcgatgcgcagcaaccggctgcgccgcgccgctatcaagctgctgggcgaggggcgcattgcaaagcgactgatgtacgcgcaggcgcacaaggctctgcgcgccgacctggacaagatcaaccgcgagtaccggcagggccgtcaggcggtccaggagcgcacgcagcgccgcgcgtgggccgactggctcaaggccgaggcgatgaagggcgacgacaaggccctggccgcgctgcgcgcacgcgagggccgcagcgacctcaagggcaacaccatccagggcagcggcgaggccaagccgggccatgcggccgtgacggacaacatcacgaagaagggaaccatcatctatcgcgtcggcagcagcgccgtccgcgacgacggcgaccgcctgcaagtctcgcgcgaggccaccacggacggcctggacgccgccctgcgcctggcaatggagcgcttcggcgaccggatcaccgtcaacggcacagcagagttcaaggagcggatcgcgcaggcggccgccgctggccgtctggcaatcacctttgacgacgccgcccttgagcgccgccgtcaagaactactgacgaaggagcaagcacatgagcaacccgaacgaaatgacggacgaagagatcgcggcggcgatggaggcattcgacctgccgcagccagaaccaccctcaacgccacaggcggcgacggcgaccgacgggacgctcgcgccgtcagcgccggcggaaccgtcgcactccgcaagcccaacgttggacgcattggacgaaagccgccgccccaaagccaaaaccgtttgcgagcgctgtcccaactcggtgtggttcgcatcgccggcggagctgaaatgctattgccgcgtgatgttcctggtcacgtggagcagcaaggagccgaaccagctcacgcactgcgacggggagtttctgggccaggaagagggctaaagcccgaacagatcgcggcggccgagaaatatgttgccgagcgcgagcaaaagcggctaaacggcttcgatataccgaagcatgcacgatatactgattatgttggtgcgctgtcctatgcaggcacccggaacgtcgaggaccaggcgctggccctgttgaggaaagaaaacgacgagattctggtgctgcccgtcgataaggccacggtgcaacgcatgaagcgcctcgccatcggtgatcccgtcaccgtgaccccgcgaggctcccttaaaactacccgaggtaggagtagatgaagaaccgaaacaacgccgtggggccacagatacgggcgaaaaaaccgaaggccagcaagaccgttcccatcctcgccggcctgtcccttggggcaggcttgcagaccgcgacgcaatatttcgcccattccttccagtatcaggccggacttggctggaatatcaaccacgtctacacgccctggtcgatccttcaatgggccggcaagtggtacggccaatatcccgacgatttcatgcgcgcggccagcatgggtatggtcgtttcgaccgtgggcctgctgggcacggccgtcacgcagatggtcaaggcgaacaccggcaaggcgaacgactatctgcacggttcggcccgctgggccgacaagaaggacatacaggccgccggcctgctgccccggccgcgcaccgtcgtcgagctggtgtcaggcaaacacccgcccacttccagcggcgtctatgtgggcggctggcaggacaaggacggcaagttccactacctgcggcacaacggccccgagcacgtcttgacctacgcgccgacgcgctccggcaagggcgtcggcctggtcgttccgacgctgctttcctgggcgcacagcgccgtcatcaccgacctgaaaggcgagttgtgggcgctgaccgccggctggcggaagaagcatgcccgcaacaaggtcgtgcgctttgagccggcatccgcgcagggtagcgcgtgctggaacccgctcgatgaaatccgcttggggaccgagtacgaggttggcgacgtgcagaaccttgccaccctgatcgtcgatccggacggcaagggcctggaatcgcactggcagaaaaccagccaggcgctgcttgtcggcgtcatcctgcacgcgctctacaaggctaagaacgagggtacgccggccaccctgccgtcggtggacggcatgcttgccgacccgaaccgcgacgtgggcgagctttggatggaaatgaccacctacggccacgttgacgggcagaaccaccctgcggtcggctctgcggcccgcgacatgatggaccgcccggaggaagaatccggttccgtgctgtccaccgccaagtcctacctggccctgtaccgcgacccggttgtggcccgcaacgtcagcaagtccgacttccgcatcaagcaactgatgcaccacgacgacccggtaagcctgttcatcgtgacgcagcccaacgacaaggcccgtctgcggcctctggtgcgcgtcatggtcaacatgatcgtccggctgctggccgacaagatggacttcgagaacggccgtcctgtcgcgcactacaagcatcgtctgctgatgatgctcgacgagttccccagcctgggcaagctcgaaatcctgcaagagtcccttgccttcgtcgccggctacggcatcaagtgctacctcatctgccaggacattaaccagctcaagagccgcgaaaccggctacggccacgacgaaagcatcacgtcgaactgccacgtgcagaacgcctacccgccgaaccgcgtggagacggccgagcacctgtcaaaactgacaggcaccacgaccatcgtgaaggagcagatcacgacgagcggccgccgcacgtcggcgctgttgggcaacgtctcgcggaccttccaggaagtgcagcggccattgctgacccccgatgaatgcctgcgcatgccggggccgaagaagagcgccgacggcagcattgaagaggcgggcgacatggttgtgtacgtcgccggctatcccgcgatctacggcaagcagccgctctacttcaaagacccgatattccaggcccgcgcggccgtaccggctccgaaggtcagcgacaagctgatccagacggccaccgtcgaggaaggggaggggatcacgatatgagccgcttccagcgcctcaccaagtacgtcgccatcggaggcggcgcggccttgttgctcgccggcgcggcctatctcgccggcgcgaaggtcaacaccaccaaaagcattccggtcggcctgtactggaaatcgaatgcgccggtggagaagggggcttacgtcatgttctgcccgccgcaagtcggcgtgttttcggacgccaaggagcggggctacatcgccggcggtttctgccccggcgactacggctacatgatgaagcgagttttagccgctaaaggcgacgaggttgccatcaccgacgccggcgtgcgcgtgaatggcgggctgctgcctcacagcgcgctcatcaaggccgatccatcaggacggccgctgcctcgttatcagtccgacagctacaccctggggaccgccgaggttctgcttatgtccgacgtaagcgacacgtctttcgacggccgctacttcgggcctgtcaatcgttcgcaaatcatcaccgtcatcaggccggttctgacctggtgataacctttttgcgtttctacaaactcttttgtttatttttctaaatacattcaaatatgtatccgctcatgagacaataaccctgataaatgcttcaataatattgaaaaaggaagagtatgagtattcaacatttccgtgtcgcccttattcccttttttgcggcattttgccttcctgtttttgctcacccagaaacgctggtgaaagtaaaagatgctgaagatcagttgggtgcacgagtgggttacatcgaactggatctcaacagcggtaagatccttgagagttttcgccccgaagaacgttttccaatgatgagcacttttaaagttctgctatgtggcgcggtattatcccgtgttgacgccgggcaagagcaactcggtcgccgcatacactattctcagaatgacttggttgagtactcaccagtcacagaaaagcatcttacggatggcatgacagtaagagaattatgcagtgctgccataaccatgagtgataacactgcggccaacttacttctgacaacgatcgtatagcttgccggaagtcgccttgacccgcatggcataggcctatcgtttccacgacgtatcacgaggccctttcgtcttcaagaattcgcggccgcaattaaccctcactaaaggatccgacgacctgcagctcacggtaactgatgccggtatttgcagtaccagcgtacggcccacagaatgatgtcacgctgaaaatgccggcctttgaatgggttcatgtgcagctccatcagcaaaaggggatgataagtttatcaccaccgactatttgcaacagtgccgttgatcgtgctatgatcgactgatgtcatcagcggtggagtgcaatgtcgtgcaatacgaatggcgaaaagccgagctcatcggtcagcttctcaaccttggggttacccccggcggtgtgctgctggtccacagctccttccgtagcgtccggcccctcgaagatgggccacttggactgatcgaggccctgcgtgctgcgctgggtccgggagggacgctcgtcatgccctcgtggtcaggtctggacgacgagccgttcgatcctgccacgtcgcccgttacaccggaccttggagttgtctctgacacattctggcgcctgccaaatgtaaagcgcagcgcccatccatttgcctttgcggcagcggggccacaggcagagcagatcatctctgatccattgcccctgccacctcactcgcctgcaagcccggtcgcccgtgtccatgaactcgatgggcaggtacttctcctcggcgtgggacacgatgccaacacgacgctgcatcttgccgagttgatggcaaaggttccctatggggtgccgagacactgcaccattcttcaggatggcaagttggtacgcgtcgattatctcgagaatgaccactgctgtgagcgctttgccttggcggacaggtggctcaaggagaagagccttcagaaggaaggtccagtcggtcatgcctttgctcggttgatccgctcccgcgacattgtggcgacagccctgggtcaactgggccgagatccgttgatcttcctgcatccgccagaggcgggatgcgaagaatgcgatgccgctcgccagtcgattggctgatcaggacggtctcgcggtatcattgcagcactggggccagatggtaagccctcccgtatcgtagttatctacacgacggggagtcaggcaactatggatgaacgaaatagacagatcgctgagataggtgcctcactgattaagcattggtaactgtcagaccaagtttactcatatatactttagattgatttacgcgccctgtagcggcgcattaagcgcggcgggtgtggtggttacgcgcagcgtgaccgctacacttgccagcgccctagcgcccgctcctttcgctttcttcccttcctttctcgccacgttcgccggctttccccgtcaagctctaaatcgggggctccctttagggttccgatttagtgctttacggcacctcgaccccaaaaaacttgatttgggtgatggttcacgtagtgggccatcgccctgatagacggtttttcgccctttgacgttggagtccacgttctttaatagtggactcttgttccaaacttgaacaacactcaaccctatctcgggctattcttttgatttataagtcgacagcgacacacttgcatcggatgcagcccggttaacgtgccggcacggcctgggtaaccaggtattttgtccacataaccgtgcgcaaaatgttgtggataagcaggacacagcagcaatccacagcaggcatacaaccgcacaccgaggttactccgttctacaggttacgacgacatgtcaatacttgcccttgacaggcattgatggaatcgtagtctcacgctgatagtctgatcgacaatacaagtgggaccgtggtcccagaccgataatcagaccgacaacacgagtgggatcgtggtcccagactaataatcagaccgacgatacgagtgggaccgtggtcccagactaataatcagaccgacgatacgagtgggaccgtggttccagactaataatcagaccgacgatacgagtgggaccgtggtcccagactaataatcagaccgacgatacgagtgggaccatggtcccagactaataatcagaccgacgatacgagtgggaccgtggtcccagtctgattatcagaccgacgatacgagtgggaccgtggtcccagactaataatcagaccgacgatacgagtgggaccgtggtcccagactaataatcagaccgacgatacgagtgggaccgtggtcccagtctgattatcagaccgacgatacaagtggaacagtgggcccagagagaatattcaggccagttatgctttctggcctgtaacaaaggacattaagtaaagacagataaacgtagactaaaacgtggtcgcatcagggtgctggcttttcaagttccttaagaatggcctcaattttctctatacactcagttggaacacgagacctgtccaggttaagcaccattttatcgcccttatacaatactgtcgctccaggagcaaactgatgtcgtgagcttaaactagttcttgatgcagatgacgttttaagcacagaagttaaaagagtgataacttcttcagcttcaaatatcaccccagcttttttctgctcatgaaggttagatgcctgctgcttaagtaattcctctttatctgtaaaggctttttgaagtgcatcacctgaccgggcagatagttcaccggggtgagaaaaaagagcaacaactgatttaggcaatttggcggtgttgatacagcgggtaataatcttacgtgaaatattttccgcatcagccagcgcagaaatatttccagcaaattcattctgcaatcggcttgcataacgctgaccacgttcataagcacttgttgggcgataatcgttacccaatctggataatgcagccatctgctcatcatccagctcgccaaccagaacacgataatcactttcggtaagtgcagcagctttacgacggcgactcccatcggcaatttctatgacaccagatactcttcgaccgaacgccggtgtctgttgaccagtcagtagaaaagaagggatgagatcatccagtgcgtcctcagtaagcagctcctggtcacgttcattacctgaccatacccgagaggtcttctcaacactatcaccccggagcacttcaagagtaaacttcacatcccgaccacatacaggcaaagtaatggcattaccgcgagccattactcctacgcgcgcaattaacgaatccaccatcggggcagctggtgtcgataacgaagtatcttcaaccggttgagtattgagcgtatgttttggaataacaggcgcacgcttcattatctaatctcccagcgtggtttaatcagacgatcgaaaatttcattgcagacaggttcccaaatagaaagagcatttctccaggcaccagttgaagagcgttgatcaatggcctgttcaaaaacagttctcatccggatctgacctttaccaacttcatccgtttcacgtacaacattttttagaaccatgcttccccaggcatcccgaatttgctcctccatccacggggactgagagccattactattgctgtatttggtaagcaaaatacgtacatcaggctcgaaccctttaagatcaacgttcttgagcagatcacgaagcatatcgaaaaactgcagtgcggaggtgtagtcaaacaactcagcaggcgtgggaacaatcagcacatcagcagcacatacgacattaatcgtgccgatacccaggttaggcgcgctgtcaataactatgacatcatagtcatgagcaacagtttcaatggccagtcggagcatcaggtgtggatcggtgggcagtttaccttcatcaaatttgcccattaactcagtttcaatacggtgcagagccagacaggaaggaataatgtcaagccccggccagcaagtgggctttattgcataagtgacatcgtccttttccccaagatagaaaggcaggagagtgtcttctgcatgaatatgaagatctggtacccatccgtgatacattgaggctgttccctgggggtcgttaccttccacgagcaaaacacgtagccccttcagagccagatcctgagcaagatgaacagaaactgaggttttgtaaacgccacctttatgggcagcaaccccgatcaccggtggaaatacgtcttcagcacgtcgcaatcgcgtaccaaacacatcacgcatatgattaatttgttcaattgtataaccaacacgttgctcaacccgtcctcgaatttccatatccgggtgcggtagtcgccctgctttctcggcatctctgatagcctgagaagaaaccccaactaaatccgctgcttcacctattctccagcgccgggttattttcctcgcttccgggctgtcatcattaaactgtgcaatggcgatagccttcgtcatttcatgaccagcgtttatgcactggttaagtgtttccatgagtttcattctgaacatcctttaatcattgctttgcgtttttttattaaatcttgcaatttactgcaaagcaacaacaaaatcgcaaagtcatcaaaaaaccgcaaagttgtttaaaataagagcaacactacaaaaggagataagaagagcacatacctcagtcacttattatcactagcgctcgccgcagccgtgtaaccgagcatagcgagcgaactggcgaggaagcaaagaagaactgttctgtcagatagctcttacgctcagcgcaagaagaaatatccaccgtgggaaaaactccaggtagaggtacacacgcggatagccaattcagagtaataaactgtgataatcaaccctcatcaatgatgacgaactaacccccgatatcaggtcacatgacgaagggaaagagaaggaaatcaactgtgacaaactgccctcaaatttggcttccttaaaaattacagttcaaaaagtatgagaaaatccatgcaggctgaaggaaacagcaaaactgtgacaaattaccctcagtaggtcagaacaaatgtgacgaaccaccctcaaatctgtgacagataaccctcagactatcctgtcgtcatggaagtgatatcgcggaaggaaaatacgatatgagtcgtctggcggcctttctttttctcaatgtatgagaggcgcattggagttctgctgttgatctcattaacacagacctgcaggaagcggcggcggaagtcaggcatacgctggtaactttgaggcagctggtaacgctctatgatccagtcgattttcagagagacgatgcctgagccatccggcttacgatactgacacagggattcgtataaacgcatggcatacggattggtgatttcttttgtttcactaagccgaaactgcgtaaaccggttctgtaacccgataaagaagggaatgagatatgggttgatatgtacactgtaaagccctctggatggactgtgcgcacgtttgataaaccaaggaaaagattcatagcctttttcatcgccggcatcctcttcagggcgataaaaaaccacttccttccccgcgaaactcttcaatgcctgccgtatatccttactggcttccgcagaggtcaatccgaatatttcagcatatttagcaacatggatctcgcagataccgtcatgttcctgtagggtgccatcagattttctgatctggtcaacgaacagatacagcatacgtttttgatcccgggagagactatatgccgcctcagtgaggtcgtttgactggacgattcgcgggctatttttacgtttcttgtgattgataaccgctgtttccgccatgacagatccatgtgaagtgtgacaagtttttagattgtcacactaaataaaaaagagtcaataagcagggataactttgtgaaaaaacagcttcttctgagggcaatttgtcacagggttaagggcaatttgtcacagacaggactgtcatttgagggtgatttgtcacactgaaagggcaatttgtcacaacaccttctctagaaccagcatggataaaggcctacaaggcgctctaaaaaagaagatctaaaaactataaaaaaaataattataaaaatatccccgtggataagtggataaccccaagggaagttttttcaggcatcgtgtgtaagcagaatatataagtgctgttccctggtgcttcctcgctcactcgagggcttcgccctgtcgctcgactgcggcgagcactactggctgtaaaaggacagaccacatcatggttctgtgttcattaggttgttctgtccattgctgacataatccgctccacttcaacgtaacaccgcacgaagatttctattgttcctgaaggcatattcaaatcgttttcgttaccgcttgcaggcatcatgacagaacactacttcctataaacgctacacaggctcctgagattaataatgcggatctctacgataatgggagattttcccgactgtttcgttcgcttctcagtggataacagccagcttctctgtttaacagacaaaaacagcatatccactcagttccacatttccatataaaggccaaggcatttattctcaggataattgtttcagcatcgcaaccgcatcagactccggcatcgcaaactgcacccggtgccgggcagccacatccagcgcaaaaaccttcgtgtagacttccgttgaactgatggacttatgtcccatcaggctttgcagaactttcagcggtataccggcatacagcatgtgcatcgcataggaatggcggaacgtatgtggtgtgaccggaacagagaacgtcacaccgtcagcagcagcggcggcaaccgcctccccaatccaggtcctgaccgttctgtccgtcacttcccagatccgcgctttctctgtccttcctgtgcgacggttacgccgctccatgagcttatcgcgaataaatacctgtgacggaagatcacttcgcagaataaataaatcctggtgtccctgttgataccgggaagccctgggccaacttttggcgctagcaaaaaaaatccttagctttcgctaaggatgataagcgtagcgcatcaggcaatttagcgtttgttaagcgatcgcgtatacactccgctatcgctacgtgactgggtcatggctgcgccccgacacccgccaacacccgctgacgcgccctgacgggcttgtctgctcccggcatccgcttacagacaagctgtgaccgtctccgggagctgcatgtgtcagaggttttcaccgtcatcaccgaaacgcgcgaggcagcaaggagatggcgcccaacagtcccccggccacggggcctgccaccatacccacgccgaaacaagcgctcatgagcccgaagtggcgagcccgatcttccccatcggtgatgtcggcgatataggcgccagcaaccgcacctgtggcgccggtgatgccggccacgatgcgtccggcgtagaggatctgctcatgtttgacagcttatc

SEQ ID NO: 381 - DNA, 11912 bp, synthetic construct
  source 1..11912: mol_type = other DNA
tagctcagtcctaggtataatactagtcacgtgaactgccgagtaggtagctgataacgagacctctgtcttgtcagctagggtggtctcgtgaactgccgagtaggtagctgataactcgagagatccggctgctaacaaacccgcttaaggaagatggccaacttatttacataaggctgctgccaccgctgagcaataactagcataaccccttggggcctctaaacgggtcttgaggggttttttggtttaaacccatctaattgggaattccccctgcctcgcgcgtttcggtgatgacggtgaaaacctctgacacagcgatcgcttatgacaacttgacggctacatcattcactttttcttcacaaccggcacggaactcgctcgggctggccccggtgcattttttaaatacccgcgagaaatagagttgatcgtcaaaaccaacattgcgaccgacggtggcgataggcatccgggtggtgctcaaaagcagcttcgcctggctgatacgttggtcctcgcgccagcttaagacgctaatccctaactgctggcggaaaagatgtgacagacgcgacggcgacaagcaaacatgctgtgcgacgctggcgatatcaaaattgctgtctgccaggtgatcgctgatgtactgacaagcctcgcgtacccgattatccatcggtggatggagcgactcgttaatcgcttccatgcgccgcagtaacaattgctcaagcagatttatcgccagcagctccgaatagcgcccttccccttgcccggcgttaatgatttgcccaaacaggtcgctgaaatgcggctggtgcgcttcatccgggcgaaagaaccccgtattggcaaatattgacggccagttaagccattcatgccagtaggcgcgcggacgaaagtaaacccactggtgataccattcgcgagcctccggatgacgaccgtagtgatgaatctctcctggcgggaacagcaaaatatcacccggtcggcaaacaaattctcgtccctgatttttcaccaccccctgaccgcgaatggtgagattgagaatataacctttcattcccagcggtcggtcgataaaaaaatcgagataaccgttggcctcaatcggcgttaaacccgccaccagatgggcattaaacgagtatcccggcagcaggggatcattttgcgcttcagccatacttttcatactcccgccattcagagaagaaaccaattgtccatattgcatcagacattgccgtcactgcgtcttttactggctcttctcgctaaccaaaccggtaaccccgcttattaaaagcattctgtaacaaagcgggaccaaagccatgacaaaaacgcgtaacaaaagtgtctataatcacggcagaaaagtccacattgattatttgcacggcgtcacactttgctatgccatagcatttttatccataagattagcggatcctacctgacgctttttatcgcaactctctactgtttctccatacccgggatccgaattcgagcgaaggagatatacatatgtttttgcaaagacctaaaccttacagcgatgaaagtttagaaagtttctttatccgagtggctaacaaaaatggctacggtgatgtccatcgcttcctagaagccactaaacgattccttcaagacattgaccataatggctatcaaacctttccgactgatataactcggataaacccatactcagctaaaaacagttccagcgcacgaactgcgtcattcctgaaacttgcacaattgacatttaatgaaccgccagagctacttgggttggcaattaacagaacaaacatgaaatactcgccgtcaactagcgcggttgttagaggtgcagaagtctttcctcgcagtttactacggacgcactccatcccctgctgtcctttgtgtctgcgagaaaatggctacgcctcctacctttggcactttcaggggtacgaatactgccacagccataacgtacctttaattaccacttgtagctgtggtaaggagtttgactaccgagtatctgggttaaagggcatttgctgcaaatgcaaggagcctatcaccttaaccagcagggagaacggtcatgaggcagcgtgtactgtttcaaactggcttgctggccatgaatctaaacctctgccaaatcttcctaaaagctaccgatggggtttagttcattggtggatgggtattaaagatagcgagttcgatcacttttcgttcgttcaatttttctcaaactggccaaggtcattccactcgataatcgaagatgaagtagagttcaaccttgagcatgctgttgtcagcacgtctgaattacgactaaaagatcttcttggtcgattgtttttcggttcaattcggttacctgagcggaatcttcaacacaatatcatccttggtgagcttctctgctatttagaaaatcgtttatggcaagacaagggattaatcgccaacctcaaaatgaacgcgttagaggcgactgtaatgttaaattgtagcctcgatcagattgcatcaatggttgaacaacgcatcttgaagccaaatcgaaaaagcaagcccaacagccctcttgatgttaccgattatctatttcatttcggcgatattttctgtctttggttagctgagttccaaagcgatgagtttaaccgttcgttttatgtgtcgaggtggtaaatgcaaactctgaaagaactaatcgcatccaatcctgacgacttaacaactgaacttaagagagcatttcgtccactcacaccgcatattgcaattgatggtaatgaacttgacgcactgacgatattagtcaatttaaccgataagactgatgatcagaaagacctgctcgatcgagccaaatgcaagcaaaaacttcgagatgaaaaatggtgggctagctgcataaattgcgttaattacagacaaagccataacccaaaattcccggatatacgttctgaaggcgtgattcgaacccaagccctgggtgaattaccgagtttcctactctcgtcctcaaaaatcccaccataccattggtcatatagccatgattcaaaatacgtcaacaaaagcgcattcctcaccaatgagttttgttgggatggtgagatctcatgtttgggtgagcttcttaaagatgcagatcacccactttggaatactttgaaaaagttaggttgttctcaaaaaacttgcaaagcaatggcaaaacaactagctgatattactctcacgactatcaatgtcacactcgcaccaaattacctgactcaaatatctctccccgatagtgatacatcctacatttcactctctcctgttgcatcgctatcgatgcaaagccactttcatcagaggctccaagatgaaaatcggcatagcgcgataacgcggtttagccgaactaccaacatgggggtcactgcgatgacatgtggcggcgcatttagaatgttaaagtctggcgctaagttttccagcccccctcatcaccgattaaacagtaaacgaagttggttgacgtcagagcatgttcagtcattaaaacagtaccagcgcctcaacaaaagcctcatacctgaaaactctcggattgcactccgtagaaaatacaaaatcgagcttcaaaatatggtcagatcttggtttgcaatgcaagaccatacccttgattcgaacatacttatccaacatttgaatcatgacctatcttacttaggagccacaaaacgttttgcatacgatccagcgatgaccaagctctttactgagcttttgaaacgagagttatcaaattcaatcaataatggtgagcaacacactaatggatcgtttttagtcctaccgaatatcagggtttgtggcgcaacagctttaagctccccggtaacggtggggattccatcacttacagctttctttggcttcgttcacgcatttgaacggaatataaatcgcaccacctcatcgtttcgtgttgaatcctttgcgatatgcgtccatcaactacatgtcgagaagcgaggtttgacagcagagtttgtggaaaaaggcgacgggactatatccgctcccgcgacccgggatgactggcagtgtgatgtcgtatttagccttattttgaacaccaactttgctcaacatattgaccaagatacgttagttacatcactaccaaagcgattggctcggggttcagcaaaaattgcgattgatgactttaaacatatcaactcattctcgacattagaaacagcgatcgaatctctgccaatagaagctggtaggtggttatcactttacgcacagtcaaacaataatctaagtgatctattagcagccatgacagaggaccatcagctcatggcaagctgcgtcggttaccacttgttagaagagcccaaagataaaccaaactccctcagaggttacaaacacgctatcgccgagtgcatcattggactcattaactcaatcacctttagctcagagactgatcccaacacaatcttttggtcgctaaagaactatcaaaactacctagtggtacagccaaggagtatcaacgatgaaactaccgacaaatctagcctatgagcgctctatcgacccatcagatgtctgtttttttgtcgtctggcccgatgatagaaaaacacctttaacctacaattctcgtactctgctcgggcaaatggaagcggcatcattagcctatgatgtctcaggtcaaccaataaaaagtgccaccgctgaggcgttagctcaagggaaccctcatcaagttgatttctgccacgttccatacggtgcgagtcatattgaatgcagtttctccgtctcgttttcttctgaactacgtcaaccatataagtgtaactcaagcaaagttaaacaaacgctagtgcaattagtcgagctctacgaaacgaaaatcggctggactgagctagcaacccgatatttgatgaacatttgcaacggtaaatggctgtggaaaaatacccgtaaagcctattgctggaacattgtacttacaccttggccttggaacggggaaaaggttggatttgaagatattcgtactaactacacctcacggcaagactttaaaaataataaaaattggtctgctatagttgaaatgatcaaaaccgcattttctagtactgatgggctggcgatatttgaagtcagggccaccttgcacttgccaacgaatgctatggtgcggccaagccaagttttcacagaaaaagaaagtggcagtaaaagtaaatctaaaactcaaaacagtcgagtttttcagagtacaactattgatggtgaacgatcgccaatactaggggcctttaaaacgggagcagctattgcaaccattgacgactggtatcctgaagccactgagccactaagggtcggacggtttggggttcatcgcgaagatgtcacttgctaccgtcatccgtctaccggaaaagattttttctcgatattacaacaagcagagcactatattgaagtgttgagcgccaacaaaactcccgctcaagaaactatcaacgacatgcactttttaatggctaacctgattaagggtgggatgttccagcataaaggagactgactgtgaaatggtattataagacaatcacctttctgccagagttgtgcaacaacgagtcactggctgcaaagtgtctccgcgttctgcatggatttaactatcagtatgagacacgaaatatcggcgtttcatttccgctttggtgtgatgcaacggttggaaaaaagatttcatttgtcagcaagaacaagatagaactcgacttactacttaaacaacactatttcgtccaaatggaacaacttcaatactttcatatatccaacactgttctcgtcccagaagattgtacatacgtttcctttagacgctgtcaatctatagataagctcacagcagcagggctggcaaggaaaatcagacgcctggagaaacgtgctctatctagaggcgagcaatttgacccatcatcttttgctcaaaaagagcatactgcaatagcgcactaccactcacttggggagtccagcaaacagacgaaccgcaactttcgactcaatatcaggatgctctcggagcaaccccgtgaggggaactcgatttttagtagctatggcttatcaaattcagaaaactcgtttcagcctgtacccttaatctgacctttaataaggagatataccatggcgacaagtttacctacgccctcagcaattacgacttcggcgttagagtatgcattccatactcccgctcgcaatctaacgaaatctcgcggaaaaaacattcatcgttatgtcagtgtaaagatgagtaagaggattacggtagaatctactctagagtgtgatgcctgctatcactttgattttgagccaagtattgttcgcttttgcgctcaaccgattcgatttttatattatctcaatggtcagtctcactcctatgttcctgactttctagttcaatttgataccaacgagtttgttctatatgaagtaaagtcagcttatgctaagaacaaacctgattttgatgttgaatgggaggcgaaagtaaaagcagcaactgaactagggctagaattggagcttgttgaagagagtgatattagggatacggttgtattaaataatcttaagcgcatgcatcgttatgcttcgaaagatgagctgaataacgtacataactctctcttaaaaataataaagtacaatggcgcccaatctgcaagatgcttgggagaacagttgggtttaaaaggccgaactgttttaccaattttgtgcgatttgctgtcaaggtgtttactcgatacacgtttggataagcctctatctcttgaatctcgatttgagttggccagttatggctaagaaagggttctcaagtttccatagaaaagcagtctcttcccaagatacgcttgaatcgatagagcttgtctctagcgctaattgtctagaaagtgttacgtatcaagatatatcagcatttcccgaaacaattgcggtagagattaatttccgattaagcattcttcgctttttagcgcgaaagtgcgaaaccattgtggccaaatcaattgaaccacatcgtgtagagctacagcaaaactatagtagaaaaatacccagtgcaataacgatatatcgatggtggcttgcttttcgaaaatcagactacaaccccattagcttagcacctaatatcaaggatagaggtaatagagagacaaaagtgtcaacagttgttgattctattatggaacaggcagttgaaagagttatatctggacgaaaagtcaatgttagctctgcatataaacgtgttcgacgaaaagttcgtcaatacaatctaactcatggaacgaaatacacgtatcctaagtacgaatctgtaagaaagcgagtaaaaaagaaaaccccatttgagttattagccgcagggaaaggggagagagtagctaagagagagtttcgccgaatgggaaaaaagatcctcacgtctagcgtgctagagagggttgaaatagatcacactgtcgttgacctttttgcagtacacgaagagtatcgaatcccattgggccgaccttggcttactcaattggttgattgttacagtaaagctgtaatcggtttttatttaggtttcgagcctcctagctatgtgtcggtttcccttgcacttaagaatgcaatacaacgcaaagatgacttaatctcctcgtatgaatcgatcgagaatgaatggctatgttatggcatcccagacctactcgtaactgataatggtaaagagtttttgtcgaaagcatttgatcaagcatgtgaatcactattgatcaatgtgcatcaaaataaagttgagacgcccgacaacaaacctcatgttgaacgtaactacgggactattaatacttctctgttagacgatttacctgggaaatccttcagccagtaccttcaaagagaagggtacgactctgtgggagaagctacccttacactcaatgagattagagaaatttacttaatttggttggtggatatttatcataaaaaacccaatcagagaggcactaattgtcctaatgttgcgtggaaaaagggttgtcaagaatgggaaccagaggagttctctggttctaaagacgaattagactttaaatttgctattgttgattacaaacaacttactaaagtagggataactgtctacaaagaactgagttatagcaatgaccgtttagctgaatatagagggaagaaaggaaaccataaagttcagttcaagtataaccctgagtgtatggcagttatttgggtgttggatgaggatatgaatgagtactttacagttaatgcgattgactacgaatatgcaagtagagtatcactttggcaacataaatataacatgaaatatcaagcagaactaaattcagcagaatatgatgaggacaaggaaattgatgcagaaataaaaattgaagaaatcgcagatcgttcaattgttaagactaacaaaatcagagctcggaggcgtggcgctaggcatcaagagaatagcgcaagggctaagtcaatcagtaatgcgaacccggcctcgatacaaaaacatgaagatgaaatcgttagtgcagataatgacgattgggatattgattatgtctgagaaatcgtcaaatgagtgaaacgcgtgaggctcgtatatcaagagctaaaagggcatttgtatccacaccgagcgttaggaaaatcttgagttacatggatagatgtagagatctatcagacctagagtctgagcctacatgcatgatggtctatggtgcttcgggtgtaggtaaaacgaccgtcatcaagaaatacttaaatcaaaacagaagagagtccgaagccgggggcgatataataccggttttgcatattgagttgccagacaatgcgaagccagtagatgcagcaagggaattgctggttgaaatgggtgacccgctagcactttatgaaactgacttagctagattgacgaaaagactgactgaattaatccctgcggtcggcgtgaagctgattattatcgatgagttccaacatttggtggaagaaaggtcaaatcgggttcttacccaagtaggtaattggctaaaaatgatacttaacaaaacgaaatgtccaattgttatatttggtatgccatactcaaaagttgtactgcaagcaaactcgcaacttcacgggcgattttccattcaggttgaactgcgcccctttagctaccagggaggtagaggtgtatttaaaacttttttggaataccttgataaagccctaccttttgaaaaacaggctggcttagccaacgaaagtttgcagaaaaaattgtatgcattctctcagggaaacatgcgttcgttgagaaaccttatttatcaagcatctatcgaagcaattgataatcagcatgagacgataaccgaagaagatttcgtttttgcatcgaagttgacatcgggcgataaacccaactcatggaaaaatccttttgaggagggtgttgaggtaacagaagatatgttacgaccgccaccaaaagatattggttgggaggactatttgagacattcaaccccgagagtgagtaaaccaggtagaaataaaaactttttcgaataacctaggctgctgcgctgctgccaccgctgagcaataactagcataaccccttggggcctctaaacgggtcttgaggggttttttgctgaaacctcaggcattgaacctgcacggtaccgagctcgaattcactggccgtcgttttacaacgtcgtgactgggaaaaccctggcgttacccaacttaatcgccttgctatcgtggccggatcttgcggcccctcggcttgaacgaattgttagacattatttgccgactaccttggtgatctcgcctttcacgtagtggacaaattcttccaactgatctgcgcgcgaggccaagcgatcttcttcttgtccaagataagcctgtctagcttcaagtatgacgggctgatactgggccggcaggcgctccattgcccagtcggcagcgacatccttcggcgcgattttgccggttactgcgctgtaccaaatgcgggacaacgtaagcactacatttcgctcatcgccagcccagtcgggcggcgagttccatagcgttaaggtttcatttagcgcctcaaatagatcctgttcaggaaccggatcaaagagttcctccgccgctggacctaccaaggcaacgctatgttctcttgcttttgtcagcaagatagccagatcaatgtcgatcgtggctggctcgaagatacctgcaagaatgtcattgcgctgccattctccaaattgcagttcgcgcttagctggataacgccacggaatgatgtcgtcgtgcacaacaatggtgacttctacagcgcggagaatctcgctctctccaggggaagccgaagtttccaaaaggtcgttgatcaaagctcgccgcgttgtttcatcaagccttacggtcaccgtaaccagcaaatcaatatcactgtgtggcttcaggccgccatccactgcggagccgtacaaatgtacggccagcaacgtcggttcgagatggcgctcgatgacgccaactacctctgatagttgagtcgatacttcggcgatcaccgcttccctcatactcttcctttttcaatattattgaagcatttatcagggttattgtctcatgagcggatacatatttgaatgtatttagaaaaataaacaaatagctagctcactcggtcgctacgctccgggcgtgagactgcggcgggcgctgcggacacatacaaagttacccacagattccgtggataagcaggggactaacatgtgaggcaaaacagcagggccgcgccggtggcgtttttccataggctccgccctcctgccagagttcacataaacagacgcttttccggtgcatctgtgggagccgtgaggctcaaccatgaatctgacagtacgggcgaaacccgacaggacttaaagatccccaccgtttccggcgggtcgctccctcttgcgctctcctgttccgaccctgccgtttaccggatacctgttccgcctttctcccttacgggaagtgtggcgctttctcatagctcacacactggtatctcggctcggtgtaggtcgttcgctccaagctgggctgtaagcaagaactccccgttcagcccgactgctgcgccttatccggtaactgttcacttgagtccaacccggaaaagcacggtaaaacgccactggcagcagccattggtaactgggagttcgcagaggatttgtttagctaaacacgcggttgctcttgaagtgtgcgccaaagtccggctacactggaaggacagatttggttgctgtgctctgcgaaagccagttaccacggttaagcagttccccaactgacttaaccttcgatcaaaccacctccccaggtggttttttcgtttacagggcaaaagattacgcgcagaaaaaaaggatctcaagaagatcctttgatcttttctactgaaccgctctagatttcagtgcaatttatctcttcaaatgtagcacctgaagtcagccccatacgatataagttgtaattctcatgttagtcatgccccgcgcccaccggaaggagctgactgggttgaaggctctcaagggcatcggtcgcacgcttgtgttgacagc

SEQ ID NO: 382 - DNA, 15655 bp, synthetic construct; identical to SEQ ID NO: 39
  source 1..15655: mol_type = other DNA

SEQ ID NO: 383 - DNA, 15683 bp, synthetic construct; identical to SEQ ID NO: 40
  source 1..15683: mol_type = other DNA

SEQ ID NO: 384 - DNA, 271 bp, synthetic construct
  source 1..271: mol_type = other DNA
tcatctgttacgccggcggtagccggccagcctcgcagagcaggattcccgttgagcaccgccaggtgcgaataagggacagtgaagaaggaacacccgctcgcgggtgggcctacttcacctatcctgcccggctgacgccgttggatacaccaaggaaagtctacacgaaccctttggcaaaatcctgtatatcgtgcgaaaaaggatggatataccgaaaaaatcgctataatgaccccgaagcagggttatgcagcggaaaagcgct

SEQ ID NO: 385 - DNA, 88 bp, synthetic construct
  source 1..88: mol_type = other DNA
gtgaactgccgagtaggtagctgataacgagacctctgtcttgtcagctagggtggtctcgtgaactgccgagtaggtagctgataac

SEQ ID NO: 386 - DNA, 88 bp, synthetic construct
  source 1..88: mol_type = other DNA
gtgacctgccgtataggcagctgaaaatgagacctctgtcttgtcagctagggtggtctcgtgacctgccgtataggcagctgaaaat

SEQ ID NO: 387 - DNA, 88 bp, synthetic construct
  source 1..88: mol_type = other DNA
gtgaactgccgagtaggtagctggaaatgagacctctgtcttgtcagctagggtggtctcgtgaactgccgagtaggtagctggaaat

SEQ ID NO: 388 - DNA, 88 bp, synthetic construct; identical to SEQ ID NO: 385
  source 1..88: mol_type = other DNA

SEQ ID NO: 389 - RNA, 88 nt, synthetic construct
  source 1..88: mol_type = other RNA
gtgacctgccgtataggcagctgaaaatgagacctctgtcttgtcagctagggtggtctcgtgacctgccgtataggcagctgaaaat

SEQ ID NO: 390 - RNA, 88 nt, synthetic construct
  source 1..88: mol_type = other RNA
gtgaactgccgagtaggtagctggaaatgagacctctgtcttgtcagctagggtggtctcgtgaactgccgagtaggtagctggaaat

SEQ ID NO: 391 - DNA, 60 bp, synthetic construct
  source 1..60: mol_type = other DNA
gcgccctgtcaatttcccttccttattagccgctgttgatacaaccataaaatgataatt

SEQ ID NO: 392 - DNA, 60 bp, synthetic construct
  source 1..60: mol_type = other DNA
taaatatcactttatggttgcatcaacagccgcttacggaatgttcttaaaacattcact

1. A system for producing a chimeric genome, comprising:
a) a donor cell comprising:
(i) a first start cassette (Cassette^{START}) comprising, from 5′ to 3′, at least one cis-acting component of a first delivery module and a first integration sequence, and
(ii) a first stop cassette (Cassette^{STOP}) comprising, from 5′ to 3′, a second integration sequence and at least one cis-acting component of the first delivery module, wherein the first Cassette^{START} is integrated at a first site in the genome of the donor cell and the first Cassette^{STOP} is integrated at a second site in the genome of the donor cell, wherein intervening sequence between the first Cassette^{START} and the first Cassette^{STOP} defines a first genomic transfer window; and
(iii) one or more trans-acting components of the first delivery module or one or more first helper polynucleotides each comprising a sequence encoding a trans-acting component of the first delivery module, wherein the first delivery module comprises the one or more trans-acting components; and
b) a recipient cell comprising one or more components of an integrator module or one or more second helper polynucleotides each comprising a sequence encoding a component of an integrator module, wherein the integrator module comprises the one or more components.

2. The system of claim 1, wherein:
(1) a sequence defined by the first genomic transfer window is capable of being transferred from the donor cell to the recipient cell upon expression of the one or more trans-acting components of the first delivery module in the donor cell, thereby generating a first donor genomic segment in the recipient cell flanked by the first integration sequence and the second integration sequence of the first Cassette^{START} and the first Cassette^{STOP}; and
(2) the first donor genomic segment is capable of being inserted into a first double-stranded target sequence in the genome of the recipient cell upon expression of the one or more components of the integrator module, thereby generating a chimeric genome in the recipient cell.

3. (canceled)

4. (canceled)

5. The system of claim 1, wherein the first and/or second genomic transfer window is about 10 kb to at least 2 MB in length and/or wherein the chimeric genome is at least about 4 MB in length.

6.-8. (canceled)

9. The system of claim 1, wherein the donor cell, the recipient cell, or any combination thereof is a eukaryotic cell or a prokaryotic cell.

10.-12. (canceled)

13. The system of claim 1, wherein the genera and/or species of the donor cell and the genera and/or the species of the recipient cell are the same or different.

14. A nucleic acid composition for producing a chimeric genome, comprising:
i) a first start cassette (Cassette^{START}) comprising, from 5′ to 3′: at least one cis-acting component of a first delivery module and a first integration sequence;
ii) a first stop cassette (Cassette^{STOP}) comprising, from 5′ to 3′: a second integration sequence and at least one cis-acting component of the first delivery module;
iii) one or more first helper polynucleotides each comprising a sequence encoding a trans-acting component of the first delivery module, wherein the first delivery module comprises one or more trans-acting components.

15.-27. (canceled)

28. The system of claim 1, wherein the first delivery module comprises or is derived from a bacterial conjugation system.

29. The system of claim 28, wherein the bacterial conjugation system is an RP4 (IncP) plasmid system, and wherein:
the at least one cis-acting component comprises an RP4 origin of transfer (oriT) sequence, and wherein the oriT sequence comprises a sequence of SEQ ID NO: 384 or a sequence that is at least 80%, 85%, 90%, 95%, 98%, 99%, or 100% identical to SEQ ID NO: 384; and
the one or more trans-acting components comprise or are derived from gene products of the RP4 plasmid.

30.-33. (canceled)

34. The system of claim 1, wherein the integrator module is derived from a transposase system or a site-directed DNA recombinase system.

35. The system of claim 1, wherein the integrator module is derived from a Type I-B, Type I-D, Type I-F, or Type V-K CRISPR-associated transposase system of a bacteria.

36. (canceled)

37. (canceled)

38. The system of claim 1, wherein:
the one or more components of the integrator module comprise:
i) an RNA-guided DNA binding complex, wherein the RNA-guided DNA binding complex comprises one or more Cas proteins, a transposase, one or more crRNAs, or any combination thereof, and
ii) a transposition complex comprising one or more transposases; and
the first integration sequence of the first Cassette^{START} comprises an R-TE (RE) and the second integration sequence of the first Cassette^{STOP} comprises an L-TE (LE).

39. (canceled)

40. The system of claim 38, wherein:
the one or more Cas proteins comprise a Cas6 protein, a Cas7 protein, and a Cas8 protein;
the transposase of the RNA-guided DNA binding complex comprises a TniQ protein; and/or
the one or more transposases of the transposition complex comprise a TnsA protein, a TnsB protein, and a TnsC protein.

41.-46. (canceled)

47. The system or of claim 38, wherein at least one of the one or more crRNAs comprise a spacer that is complementary to a search target sequence on a first strand of the first double stranded target sequence.

48.-58. (canceled)

59. The system of claim 1, wherein the first Cassette^{START}, the first Cassette^{STOP} or any combination thereof comprise: one or more marker polynucleotides each comprising a sequence encoding a positive or negative screening and/or selection marker.

60. The system of claim 59, wherein:
the positive screening and/or selection marker is selected from the group comprising: a fluorescent protein, an antibiotic resistance cassette, an enzyme, or any combination thereof, and/or
the negative screening and/or selection marker is selected from the group comprising: a fluorescent protein, an enzyme, or a combination thereof.

61.-64. (canceled)

65. The system of claim 1, wherein:
one or more of the one or more first helper polynucleotides comprise a first promoter operably linked to the sequence encoding a trans-acting component of the first delivery module; and/or
one or more of the one or more second helper polynucleotides comprise a second promoter operably linked to the sequence encoding a component of an integrator module.

66.-76. (canceled)

77. The system of claim 1, wherein:
two or more of the one or more first helper polynucleotides are situated on the same nucleic acid, and/or
two or more of the one or more second helper polynucleotides are situated on the same nucleic acid,
and wherein the two or more first and/or second helper polynucleotides situated on the same nucleic acid are comprised within an operon or operably linked via a tandem expression element.

78.-80. (canceled)

81. The system of claim 1, wherein:
i) the first Cassette^{START} comprises the sequence of SEQ ID NO: 370 or a sequence that is at least 80%, 85%, 90%, 95%, 98%, 99%, or 100% identical to SEQ ID NO: 370; and/or
ii) the first Cassette^{STOP} comprises the sequence of SEQ ID NO: 371 or a sequence that is at least 80%, 85%, 90%, 95%, 98%, 99%, or 100% identical to SEQ ID NO: 371.

82. The system of claim 78, wherein:
the two or more first helper polynucleotides comprised within an operon or operably linked via a tandem expression element comprise the sequence of SEQ ID NO: 376 or a sequence that is at least 80%, 85%, 90%, 95%, 98%, 99%, or 100% identical to any one of SEQ ID NO: 376; and/or
the two more second helper polynucleotides comprised within an operon or operably linked via a tandem expression element comprise the sequence of SEQ ID NO: 377 or a sequence that is at least 80%, 85%, 90%, 95%, 98%, 99%, or 100% identical to any one of SEQ ID NO: 377.

83. (canceled)

84. (canceled)

85. A method for producing a chimeric genome, comprising:
contacting the recipient cell of claim 1 with the donor cell of claim 1, and:
expressing the one or more trans-acting components of the first delivery module in the donor cell, thereby the sequence defined by the genomic transfer window is transferred from the donor cell to the recipient cell and thereby the first donor genomic segment comprising the first donor sequence flanked by the first integration sequence and the second integration sequence of the first Cassette^{START} and the first Cassette^{STOP} is generated in the recipient cell; and
expressing the one or more components of the integrator module in the recipient cell, thereby the first donor genomic segment is inserted into the first double-stranded target sequence in the genome of the recipient cell,
thereby generating the chimeric genome in the recipient cell.

86.-93. (canceled)
